United States Patent Application Publication US 2012/0159672 A1 - sequence listing, part 18

SEQ ID NO: 41120 - DNA, 2189 bp, Zea mays subsp. mays
  misc_feature (1)..(2189): Ceres Seq. ID no. 12375779
gcacgagaccattacctagaacatcctaatcgaaaagcccaaaattttcggaggctgtccaccgcaccaccaccctgcgcgccgagcgcaccccgatccagatccacccatcctccggtctccggcgggcgccctcttcaacgtcctcacgcgcctccggacgccagtgcgcgcgcagtgagcatcaacatcaacccacctcttctctcgtcggaccggtgcgcaccaggcggcggcggaggcggcaggcatgaaacgggtgtcgtcgcacgtctcgctcgcctccgaggcggagatcaacctcgacctgtcgcgcctcgtcatcgacaagcccaggttcacgctggagcggaagcgctccttcgacgagcagtcgtggagcgagctctcccaccgccagaacgacggcttcgacagcgtgctgcagtcgccggcattcccgtccggcggcttcgactcgcccttctccgtcggcacgcacttcggcggcccgcacccgctcgtcaacgaggcctgggaggcgctcaggaaatcggtcgtctacttccgggaacagcccgtcggcaccattgctgccgtcgatcatgcgtcggaggaagtgctcaactatgatcaggtttttgtgagggatttcgttccgagcgcattggcttttctaatgaacaatgagactgacatagtgaagaattttcttttgaaaactcttcaccttcagagctctgagaaaatggtagaccgattcaagcttggagcaggagcgatgccagcaagtttcaaggtggaccgtaataaaaacagaaacactgaaaccttagtggctgattttggtgagagtgcaatcggtagggtggcaccggttgactctggattttggtggatcattctccttcgggcatatacaaagtacaccggagatgttagtttgtcagaatcacctgaatgccagaagtgcatgaggttgatactgaatctctgcttatctgaaggatttgatacttttccaactctgctctgcacagatggctgctcaatgattgatcgtcgaatgggtatatatggttatcccattgagatccaagccctattctatatggcattaagatgtgctctccaaatgctcaagccagagggcgaagggaaggatttcatagagaagatagggcaacgactacatgcactaacctaccacatgaggaattacttctggctagattttcaccagctgaataacatatacagatacaaaacagaagagtattcccacactgctgtgaacaagttcaatgtaattccagattccattcctgattgggtgtttgatttcatgccatgtcgaggagctactttcttggcaacgtcagccctgctatgatggatttcaggtggtttgcccttggcaattgcattgccattgtatcatctctagctaccccagaacagtcagttgctataatggatctgatcgaggaaaagtgggatgagctagttggtgagatgcctctgaagatatgctatcctgctctcgagaatcatgagtggagaattattactggatgtgaccccaaaaacacccggtggagttaccacaatggaggatcttggccagttcttctgtggctgctgacagcagcctgcataaagactggtcggccacaaatggcaaaacgtgccattgagctcgcagagtcaaggctgctcaaggacggctggcccgagtattacgatggcaagctaggaagattcgttggcaagcaggccaggaagttccagacctggtccattgccggttacctcgtcgcccgcatgatgctggaggacccatcgacactgatgatgatctccatggaggaggaccgccctgtgaagtcgaccatgcggcggtcagcatcatggaatgcctgaatgcgtggatagttgtttctgaaccaaggaaattcagaatcagctgttatacggatttgtgatttgtttggaccacaagagtgcagcgttggtgtgatttgttgggaccacaaagttcaacattgattatagttggactctgtcaattaggacagagtttgtataccatagaggatcataggagttgcacaagattttgccatgcccttttggtttgtttcagaacaatactcaggatcctgttcagttgaaaccttgattttggaataacaaatcactgtttatgc

SEQ ID NO: 41121 - protein, 373 aa, Zea mays subsp. mays
  peptide (1)..(373): Ceres Seq. ID no. 12375780
  misc_feature (82)..(367): Pfam Name: Pfam Description:  Plant neutral invertase
  misc_feature (6)..(367): NCBI GI NO: 18413234 NR Description: neutral invertase like protein
  misc_feature (11)..(367): NCBI GI NO: 18395144 NR Description: putative invertase; protein id: At1g22650
  misc_feature (6)..(367): NCBI GI NO: 25354737 NR Description: neutral invertase like protein
  misc_feature (11)..(367): NCBI GI NO: 21594008 NR Description: putative invertase [Arabidopsis thaliana]
  misc_feature (9)..(367): NCBI GI NO: 15236209 NR Description: invertase - like protein; protein id: At4g34860
  misc_feature (67)..(367): NCBI GI NO: 15218303 NR Description: neutral invertase, putative; protein id:At1g72000
  misc_feature (54)..(367): NCBI GI NO: 7487359 NR Description: hypothetical protein T22J18
  misc_feature (87)..(363): NCBI GI NO: 34894878 NR Description: putative neutral invertase
  misc_feature (80)..(363): NCBI GI NO: 15242261 NR Description: alkaline/neutral invertase; protein id:At5g22510
  misc_feature (84)..(363): NCBI GI NO: 21322510 NR Description: neutral invertase [Beta vulgaris]
MKRVSSHVSLASEAEINLDLSRLVIDKPRFTLERKRSFDEQSWSELSHRQNDGFDSVLQSPAFPSGGFDSPFSVGTHFGGPHPLVNEAWEALRKSVVYFREQPVGTIAAVDHASEEVLNYDQVFVRDFVPSALAFLMNNETDIVKNFLLKTLHLQSSEKMVDRFKLGAGAMPASFKVDRNKNRNTETLVADFGESAIGRVAPVDSGFWWIILLRAYTKYTGDVSLSESPECQKCMRLILNLCLSEGFDTFPTLLCTDGCSMIDRRMGIYGYPIEIQALFYMALRCALQMLKPEGEGKDFIEKIGQRLHALTYHMRNYFWLDFHQLNNIYRYKTEEYSHTAVNKFNVIPDSIPDWVFDFMPCRGATFLATSALL

SEQ ID NO: 41122 - protein, 237 aa, Zea mays subsp. mays
  peptide (1)..(237): Ceres Seq. ID no. 12375781
  misc_feature (1)..(231): Pfam Name: Pfam Description:  Plant neutral invertase
  misc_feature (1)..(231): NCBI GI NO: 18413234 NR Description: neutral invertase like protein
  misc_feature (1)..(231): NCBI GI NO: 18395144 NR Description: putative invertase; protein id: At1g22650
  misc_feature (1)..(231): NCBI GI NO: 25354737 NR Description: neutral invertase like protein
  misc_feature (1)..(231): NCBI GI NO: 21594008 NR Description: putative invertase [Arabidopsis thaliana]
  misc_feature (1)..(231): NCBI GI NO: 15236209 NR Description: invertase - like protein; protein id: At4g34860
  misc_feature (1)..(231): NCBI GI NO: 15218303 NR Description: neutral invertase, putative; protein id:At1g72000
  misc_feature (1)..(231): NCBI GI NO: 7487359 NR Description: hypothetical protein T22J18
  misc_feature (1)..(227): NCBI GI NO: 34894878 NR Description: putative neutral invertase
  misc_feature (1)..(227): NCBI GI NO: 15242261 NR Description: alkaline/neutral invertase; protein id:At5g22510
  misc_feature (1)..(227): NCBI GI NO: 21322510 NR Description: neutral invertase [Beta vulgaris]
MNNETDIVKNFLLKTLHLQSSEKMVDRFKLGAGAMPASFKVDRNKNRNTETLVADFGESAIGRVAPVDSGFWWIILLRAYTKYTGDVSLSESPECQKCMRLILNLCLSEGFDTFPTLLCTDGCSMIDRRMGIYGYPIEIQALFYMALRCALQMLKPEGEGKDFIEKIGQRLHALTYHMRNYFWLDFHQLNNIYRYKTEEYSHTAVNKFNVIPDSIPDWVFDFMPCRGATFLATSALL

SEQ ID NO: 41123 - protein, 214 aa, Zea mays subsp. mays
  peptide (1)..(214): Ceres Seq. ID no. 12375782
  misc_feature (1)..(208): Pfam Name: Pfam Description:  Plant neutral invertase
  misc_feature (1)..(208): NCBI GI NO: 18413234 NR Description: neutral invertase like protein
  misc_feature (1)..(208): NCBI GI NO: 18395144 NR Description: putative invertase; protein id: At1g22650
  misc_feature (1)..(208): NCBI GI NO: 25354737 NR Description: neutral invertase like protein
  misc_feature (1)..(208): NCBI GI NO: 21594008 NR Description: putative invertase [Arabidopsis thaliana]
  misc_feature (1)..(208): NCBI GI NO: 15236209 NR Description: invertase - like protein; protein id: At4g34860
  misc_feature (1)..(208): NCBI GI NO: 15218303 NR Description: neutral invertase, putative; protein id:At1g72000
  misc_feature (1)..(208): NCBI GI NO: 7487359 NR Description: hypothetical protein T22J18
  misc_feature (1)..(204): NCBI GI NO: 34894878 NR Description: putative neutral invertase
  misc_feature (1)..(204): NCBI GI NO: 15242261 NR Description: alkaline/neutral invertase; protein id:At5g22510
  misc_feature (1)..(204): NCBI GI NO: 21322510 NR Description: neutral invertase [Beta vulgaris]
MVDRFKLGAGAMPASFKVDRNKNRNTETLVADFGESAIGRVAPVDSGFWWIILLRAYTKYTGDVSLSESPECQKCMRLILNLCLSEGFDTFPTLLCTDGCSMIDRRMGIYGYPIEIQALFYMALRCALQMLKPEGEGKDFIEKIGQRLHALTYHMRNYFWLDFHQLNNIYRYKTEEYSHTAVNKFNVIPDSIPDWVFDFMPCRGATFLATSALL

SEQ ID NO: 41124 - DNA, 1332 bp, Zea mays subsp. mays
  misc_feature (1)..(1332): Ceres Seq. ID no. 12375832
ggttctgggcctattcacggcattcagggggaaatgggtgagttccaagctcttcctctcatcaacttcttcccgttccacgcagaccaaccagacattaagaattgagatcctgcaaccgcaacaatggcggccatggcgaacacctctcgtctccccaccccctgcagcctcccaaccatcagcatcggcgctaagagcaggaggctagctgtggcggccgtcagatgcggtcccggcggcagcaggagccaccggaggagccttggggtcttgctgtgtcgatcctcgtccacggccggagcccaagggagcacgaggatggaggactataacaccgccatgaagcggatgatgcgtaacccctacgagtaccatcacgatctcggcatgaactatgctgtcataagtgagagcttgattgttggctcacagcctcagaagcctgaagatatcaatcacttgaaaaatgaagagcgagtagcatatattctttgcttacagcaggacaaggacattgaatattggggcattgacttccaatccattgtcaataggtgcaaagaacttggcattcagcacatcaggagaccggccgtggattttgatccagactcactgaggtcgcaactgccgaaagcagtttcggcgctagaatgggctacgtcgcagcgcaaagggcgggtttatgtccactgcaccgctgggcttgggagagcacctgcggttgcaatcgcttacatgttttggtttgagaacatggatcttaacacggcttatcagaagctaacctccataaggccctgtggacccagcaagagagccatccgcgccgcaacctatgatctagctaagaacgatccatccaaagagccttttgagaaccttccggagcacgcttttgagggcgttgcagactgggagaggaagttgattcatgaccgggtgcgtgctcttcacgaagcatgagcagaagaaactttctccacgcgtcaagaaggggaactaagcttcctaatgaggcaatggctgtgcttcggcaccagatcattagatgtcgaaacgataaagtttgttctcaataaagcgtatacgacgccatatttgttgctgggtagtttgtaatagtcactaataggaaggaaataaagagggccttgcatgagattccagctggtgtcttcacctttgtggtgactgcaaatgagatgcccatccattaatggcatggcgcattgtaggtatattgtgtaaataaacctgtggatcttcatttgaggaacatcacttctgtaaaagtttatttgaagatacggccagctttgcaaatcc

SEQ ID NO: 41125 - protein, 280 aa, Zea mays subsp. mays
  peptide (1)..(280): Ceres Seq. ID no. 12375833
  misc_feature (143)..(230): Pfam Name: Pfam Description:  Dual specificity phosphatase, catalytic domain
  misc_feature (45)..(277): NCBI GI NO: 18399058 NR Description: expressed protein; protein id: At3g10940
  misc_feature (45)..(277): NCBI GI NO: 21592631 NR Description: unknown [Arabidopsis thaliana]
  misc_feature (10)..(241): NCBI GI NO: 14970762 NR Description: protein tyrosine phosphatase
  misc_feature (54)..(262): NCBI GI NO: 18409505 NR Description: putative protein; protein id: At3g52180
  misc_feature (54)..(241): NCBI GI NO: 11288831 NR Description: hypothetical protein F4F15
  misc_feature (54)..(262): NCBI GI NO: 16612246 NR Description: AT3g52180/F4F15_290 [Arabidopsis thaliana]
  misc_feature (54)..(262): NCBI GI NO: 21536905 NR Description: unknown [Arabidopsis thaliana]
  misc_feature (62)..(258): NCBI GI NO: 18395843 NR Description: expressed protein; protein id: At3g01510
  misc_feature (62)..(258): NCBI GI NO: 21592520 NR Description: unknown [Arabidopsis thaliana]
  misc_feature (62)..(258): NCBI GI NO: 6016710 NR Description: unknown protein [Arabidopsis thaliana]
MAAMANTSRLPTPCSLPTISIGAKSRRLAVAAVRCGPGGSRSHRRSLGVLLCRSSSTAGAQGSTRMEDYNTAMKRMMRNPYEYHHDLGMNYAVISESLIVGSQPQKPEDINHLKNEERVAYILCLQQDKDIEYWGIDFQSIVNRCKELGIQHIRRPAVDFDPDSLRSQLPKAVSALEWATSQRKGRVYVHCTAGLGRAPAVAIAYMFWFENMDLNTAYQKLTSIRPCGPSKRAIRAATYDLAKNDPSKEPFENLPEHAFEGVADWERKLIHDRVRALHEA

SEQ ID NO: 41126 - protein, 277 aa, Zea mays subsp. mays
  peptide (1)..(277): Ceres Seq. ID no. 12375834
  misc_feature (140)..(227): Pfam Name: Pfam Description:  Dual specificity phosphatase, catalytic domain
  misc_feature (42)..(274): NCBI GI NO: 18399058 NR Description: expressed protein; protein id: At3g10940
  misc_feature (42)..(274): NCBI GI NO: 21592631 NR Description: unknown [Arabidopsis thaliana]
  misc_feature (7)..(238): NCBI GI NO: 14970762 NR Description: protein tyrosine phosphatase
  misc_feature (51)..(259): NCBI GI NO: 18409505 NR Description: putative protein; protein id: At3g52180
  misc_feature (51)..(238): NCBI GI NO: 11288831 NR Description: hypothetical protein F4F15
  misc_feature (51)..(259): NCBI GI NO: 16612246 NR Description: AT3g52180/F4F15_290 [Arabidopsis thaliana]
  misc_feature (51)..(259): NCBI GI NO: 21536905 NR Description: unknown [Arabidopsis thaliana]
  misc_feature (59)..(255): NCBI GI NO: 18395843 NR Description: expressed protein; protein id: At3g01510
  misc_feature (59)..(255): NCBI GI NO: 21592520 NR Description: unknown [Arabidopsis thaliana]
  misc_feature (59)..(255): NCBI GI NO: 6016710 NR Description: unknown protein [Arabidopsis thaliana]
MANTSRLPTPCSLPTISIGAKSRRLAVAAVRCGPGGSRSHRRSLGVLLCRSSSTAGAQGSTRMEDYNTAMKRMMRNPYEYHHDLGMNYAVISESLIVGSQPQKPEDINHLKNEERVAYILCLQQDKDIEYWGIDFQSIVNRCKELGIQHIRRPAVDFDPDSLRSQLPKAVSALEWATSQRKGRVYVHCTAGLGRAPAVAIAYMFWFENMDLNTAYQKLTSIRPCGPSKRAIRAATYDLAKNDPSKEPFENLPEHAFEGVADWERKLIHDRVRALHEA

SEQ ID NO: 41127 - protein, 215 aa, Zea mays subsp. mays
  peptide (1)..(215): Ceres Seq. ID no. 12375835
  misc_feature (78)..(165): Pfam Name: Pfam Description:  Dual specificity phosphatase, catalytic domain
  misc_feature (1)..(212): NCBI GI NO: 18399058 NR Description: expressed protein; protein id: At3g10940
  misc_feature (1)..(212): NCBI GI NO: 21592631 NR Description: unknown [Arabidopsis thaliana]
  misc_feature (1)..(176): NCBI GI NO: 14970762 NR Description: protein tyrosine phosphatase
  misc_feature (1)..(197): NCBI GI NO: 18409505 NR Description: putative protein; protein id: At3g52180
  misc_feature (1)..(176): NCBI GI NO: 11288831 NR Description: hypothetical protein F4F15
  misc_feature (1)..(197): NCBI GI NO: 16612246 NR Description: AT3g52180/F4F15_290 [Arabidopsis thaliana]
  misc_feature (1)..(197): NCBI GI NO: 21536905 NR Description: unknown [Arabidopsis thaliana]
  misc_feature (1)..(193): NCBI GI NO: 18395843 NR Description: expressed protein; protein id: At3g01510
  misc_feature (1)..(193): NCBI GI NO: 21592520 NR Description: unknown [Arabidopsis thaliana]
  misc_feature (1)..(193): NCBI GI NO: 6016710 NR Description: unknown protein [Arabidopsis thaliana]
MEDYNTAMKRMMRNPYEYHHDLGMNYAVISESLIVGSQPQKPEDINHLKNEERVAYILCLQQDKDIEYWGIDFQSIVNRCKELGIQHIRRPAVDFDPDSLRSQLPKAVSALEWATSQRKGRVYVHCTAGLGRAPAVAIAYMFWFENMDLNTAYQKLTSIRPCGPSKRAIRAATYDLAKNDPSKEPFENLPEHAFEGVADWERKLIHDRVRALHEA

SEQ ID NO: 41128 - DNA, 732 bp, Zea mays subsp. mays
  misc_feature (1)..(732): Ceres Seq. ID no. 12355130
gtctaatcaatcccgcattccccattgcacgccgtctccgctagggttttactccgcagccacaccgcgccgccggagcagcgcgagacccgcgaggcgagccacgcgagagagatgaggctcctgacgcacaacatgctggcgtcgaacgtccggggcgcaaccaccggctacccgctgacgctggaggcgaccaactggtgcaccaaggaggtggagctcaactccgacttcatccgcggtctcctccccaagatcgactggcgcgcgctcgtcgccgccacccgcgcgatcggcctccccgagctcctccccgaggagcagccccccgaggaggagatcttcgccgagggcgccgccgacgtcgagggaagcgccatccgccgcatccaccacgcgctcctcgaggttcatgtccaggagggctccctcgtctgccccgacaccagccgctgcttccccatcaacaagggcatccccaacatgatgctccacgaggacgaggtctgattttgccgtgtcagtttcgccctggcctcttttgctcgcgcacctgctctacatggtctgtcgcgaagggtatcaggccttgtggacttcgtactcagattgtacctgtgaagtatggattgcagtcttgcagattgtgcccttataatatgatagatagccgtgtaatactcggaattgccgtttcgtgttgttaatttggtgcatgtcatgctttgttcc

SEQ ID NO: 41129 - protein, 131 aa, Zea mays subsp. mays
  peptide (1)..(131): Ceres Seq. ID no. 12355131
  misc_feature (1)..(131): NCBI GI NO: 22535669 NR Description: contains ESTsAU070845
  misc_feature (1)..(131): NCBI GI NO: 18395095 NR Description: Expressed protein; protein id: At1g22270
  misc_feature (1)..(131): NCBI GI NO: 25518574 NR Description: hypothetical protein T16E15
  misc_feature (1)..(131): NCBI GI NO: 15218237 NR Description: unknown protein; protein id: At1g78190.1
  misc_feature (8)..(131): NCBI GI NO: 30725332 NR Description: At1g78190 [Arabidopsis thaliana]
  misc_feature (1)..(130): NCBI GI NO: 27661288 NR Description: similar to RIKEN cDNA 0610038D11
  misc_feature (1)..(130): NCBI GI NO: 13385802 NR Description: RIKEN cDNA 0610038D11 [Mus musculus]
  misc_feature (1)..(129): NCBI GI NO: 16740612 NR Description: RIKEN cDNA 0610038D11 gene [Mus musculus]
  misc_feature (1)..(130): NCBI GI NO: 12833869 NR Description: unnamed protein product [Mus musculus]
  misc_feature (1)..(111): NCBI GI NO: 39591375 NR Description: Hypothetical protein CBG20872
MRLLTHNMLASNVRGATTGYPLTLEATNWCTKEVELNSDFIRGLLPKIDWRALVAATRAIGLPELLPEEQPPEEEIFAEGAADVEGSAIRRIHHALLEVHVQEGSLVCPDTSRCFPINKGIPNMMLHEDEV

SEQ ID NO: 41130 - protein, 124 aa, Zea mays subsp. mays
  peptide (1)..(124): Ceres Seq. ID no. 12355132
  misc_feature (1)..(124): NCBI GI NO: 22535669 NR Description: contains ESTsAU070845
  misc_feature (1)..(124): NCBI GI NO: 18395095 NR Description: Expressed protein; protein id: At1g22270
  misc_feature (1)..(124): NCBI GI NO: 25518574 NR Description: hypothetical protein T16E15
  misc_feature (1)..(124): NCBI GI NO: 15218237 NR Description: unknown protein; protein id: At1g78190.1
  misc_feature (1)..(124): NCBI GI NO: 30725332 NR Description: At1g78190 [Arabidopsis thaliana]
  misc_feature (1)..(123): NCBI GI NO: 27661288 NR Description: similar to RIKEN cDNA 0610038D11
  misc_feature (1)..(123): NCBI GI NO: 13385802 NR Description: RIKEN cDNA 0610038D11 [Mus musculus]
  misc_feature (1)..(122): NCBI GI NO: 16740612 NR Description: RIKEN cDNA 0610038D11 gene [Mus musculus]
  misc_feature (1)..(123): NCBI GI NO: 12833869 NR Description: unnamed protein product [Mus musculus]
  misc_feature (1)..(104): NCBI GI NO: 39591375 NR Description: Hypothetical protein CBG20872
MLASNVRGATTGYPLTLEATNWCTKEVELNSDFIRGLLPKIDWRALVAATRAIGLPELLPEEQPPEEEIFAEGAADVEGSAIRRIHHALLEVHVQEGSLVCPDTSRCFPINKGIPNMMLHEDEV

SEQ ID NO: 41131 - DNA, 472 bp, Zea mays subsp. mays
  misc_feature (1)..(472): Ceres Seq. ID no. 2076396
gtcccaggagcgtggcctcactctcctcgtcgcatcccctctcctcatcttcaaagcgcgggcggcggcaatggcgatggcctccacctacgcgccgggcggaggcgcgggggcgctcgcgcagggaagatgcaggtccgcggtcccgcggggctgggcttcctcggcccctccaaggccgccggcctcccccgccccctcgccctcgccaggcggacgagcagccccgtcgcggtgggcgccaggccgcgcttcatccagcacaagaaggaggccttctggttctaccgcttcctctccatcgtgtacgaccacgtcatcaacccgggccactggaccgaggacatgcgcgacgacgcgctggaacccgccgacctcttcagccgccacctcacggtcgtcgacgtcggcggcggcacggggttcaccacgctcggcatcgtcaagcacgtcaacccggagaacgtcacgc

SEQ ID NO: 41132 - protein, 157 aa, Zea mays subsp. mays
  peptide (1)..(157): Ceres Seq. ID no. 2076397
  misc_feature (86)..(156): Pfam Name: Pfam Description:  ubiE/COQ5 methyltransferase family
  misc_feature (47)..(156): NCBI GI NO: 34393472 NR Description: putative 37kDa chloroplast inner envelope membranepolypeptide precursor
  misc_feature (56)..(156): NCBI GI NO: 25458195 NR Description: membrane protein, 37K, chloroplast inner envelope
  misc_feature (63)..(156): NCBI GI NO: 7489166 NR Description: membrane protein
  misc_feature (64)..(156): NCBI GI NO: 15229430 NR Description: putative chloroplast inner envelope protein
  misc_feature (64)..(156): NCBI GI NO: 21553996 NR Description: putative chloroplast inner envelope protein
  misc_feature (64)..(156): NCBI GI NO: 15005009 NR Description: APG1 [Arabidopsis thaliana]
  misc_feature (24)..(156): NCBI GI NO: 124429 NR Description: 37 KD INNER ENVELOPE MEMBRANE PROTEIN
  misc_feature (74)..(156): NCBI GI NO: 37265798 NR Description: MPBQ/MSBQ methyltransferase
VPGAWPHSPRRIPSPHLQSAGGGNGDGLHLRAGRRRGGARAGKMQVRGPAGLGFLGPSKAAGLPRPLALARRTSSPVAVGARPRFIQHKKEAFWFYRFLSIVYDHVINPGHWTEDMRDDALEPADLFSRHLTVVDVGGGTGFTTLGIVKHVNPENVT

SEQ ID NO: 41133 - protein, 157 aa, Zea mays subsp. mays
  peptide (1)..(157): Ceres Seq. ID no. 2076398
  misc_feature (84)..(156): Pfam Name: Pfam Description:  Mucin-like glycoprotein
  misc_feature (3)..(156): NCBI GI NO: 39583515 NR Description: Hypothetical protein CBG21601
  misc_feature (19)..(156): NCBI GI NO: 11359723 NR Description: proteophosphoglycan, membrane-associated
  misc_feature (21)..(152): NCBI GI NO: 5420387 NR Description: proteophosphoglycan [Leishmania major]
  misc_feature (21)..(156): NCBI GI NO: 11359723 NR Description: proteophosphoglycan, membrane-associated
  misc_feature (19)..(155): NCBI GI NO: 11359723 NR Description: proteophosphoglycan, membrane-associated
  misc_feature (19)..(152): NCBI GI NO: 13592175 NR Description: ppg3 [Leishmania major]
  misc_feature (7)..(154): NCBI GI NO: 23510008 NR Description: hypothetical protein [Plasmodium falciparum 3D7]
  misc_feature (21)..(156): NCBI GI NO: 5420387 NR Description: proteophosphoglycan [Leishmania major]
  misc_feature (21)..(156): NCBI GI NO: 13592175 NR Description: ppg3 [Leishmania major]
  misc_feature (19)..(156): NCBI GI NO: 13592175 NR Description: ppg3 [Leishmania major]
SQERGLTLLVASPLLIFKARAAAMAMASTYAPGGGAGALAQGRCRSAVPRGWASSAPPRPPASPAPSPSPGGRAAPSRWAPGRASSSTRRRPSGSTASSPSCTTTSSTRATGPRTCATTRWNPPTSSAATSRSSTSAAARGSPRSASSSTSTRRTSR

SEQ ID NO: 41134 - protein, 156 aa, Zea mays subsp. mays
  peptide (1)..(156): Ceres Seq. ID no. 2076399
  misc_feature (29)..(155): NCBI GI NO: 23105183 NR Description: hypothetical protein [Azotobacter vinelandii]
PRSVASLSSSHPLSSSSKRGRRQWRWPPPTRRAEARGRSRREDAGPRSRGAGLPRPLQGRRPPPPPRPRQADEQPRRGGRQAALHPAQEGGLLVLPLPLHRVRPRHQPGPLDRGHARRRAGTRRPLQPPPHGRRRRRRHGVHHARHRQARQPGERH

SEQ ID NO: 41135 - protein, 114 aa, Zea mays subsp. mays
  peptide (1)..(114): Ceres Seq. ID no. 2076400
  misc_feature (43)..(113): Pfam Name: Pfam Description:  ubiE/COQ5 methyltransferase family
  misc_feature (4)..(113): NCBI GI NO: 34393472 NR Description: putative 37kDa chloroplast inner envelope membranepolypeptide precursor
  misc_feature (13)..(113): NCBI GI NO: 25458195 NR Description: membrane protein, 37K, chloroplast inner envelope
  misc_feature (20)..(113): NCBI GI NO: 7489166 NR Description: membrane protein
  misc_feature (21)..(113): NCBI GI NO: 15229430 NR Description: putative chloroplast inner envelope protein
  misc_feature (21)..(113): NCBI GI NO: 21553996 NR Description: putative chloroplast inner envelope protein
  misc_feature (21)..(113): NCBI GI NO: 15005009 NR Description: APG1 [Arabidopsis thaliana]
  misc_feature (1)..(113): NCBI GI NO: 124429 NR Description: 37 KD INNER ENVELOPE MEMBRANE PROTEIN
  misc_feature (31)..(113): NCBI GI NO: 37265798 NR Description: MPBQ/MSBQ methyltransferase
MQVRGPAGLGFLGPSKAAGLPRPLALARRTSSPVAVGARPRFIQHKKEAFWFYRFLSIVYDHVINPGHWTEDMRDDALEPADLFSRHLTVVDVGGGTGFTTLGIVKHVNPENVT

SEQ ID NO: 41136 - DNA, 893 bp, Zea mays subsp. mays
  misc_feature (1)..(893): Ceres Seq. ID no. 12340397
  misc_feature (596)..(596): n is a, c, t, g, unknown, or other
caggctccattacccagattcctattctaacaatgcctaacgatgatatcacacacccaactcctgaccttactggatacattactgagggacagatatacattgataggcagctccataacagacagatttatccacctattaatgtcctgccatctctttcacgattgatgaagagtgctattggtgagggcatgacacgtcgagaccattcggatgtatctaatcagctttatgccaactatgctattggaaaggatgttcaggccatgaaggctgtcgttggagaggaggcactctcgtctgaggatctgctttacttagagttccttgacaagtttgagaggaagtttgtgacacaaggagcatatgacacacggaacatcttccagtcactcgatcttgcatggacattgcttcggatcttccctcgcgaacttctccaccgtattccagcaaagaccttggaccagtactatagcagagatgcttcccactgaatcactgatcgttgatcagtgttccaatattttggcaagtgcagctttgaataaattgaacagattggcctcgtggccattttcccgtatttatcngtagtcaggtccaattcttttctgttggtgagcgcaagttattcatagatgactcggtcatgggaatatttgtaatattatgtcatgtatcgttaaatttcagttgttttgtttcagctgccagaactgttagcaagagtattctggagctggaagctcgaacgcaactggttgtatctatatccgtgaatgccgaataaaggaggggcaataaactgcagcgaaatatgtgctgtcagacattgttgaacattttctcgattttgctgttttgagatgtgagaaatcttttcactg

SEQ ID NO: 41137 - protein, 165 aa, Zea mays subsp. mays
  peptide (1)..(165): Ceres Seq. ID no. 12340398
  misc_feature (1)..(60): Pfam Name: Pfam Description:  ATP synthase alpha/beta family
  misc_feature (1)..(165): NCBI GI NO: 14150751 NR Description: vacuolar ATPase B subunit [Oryza sativa]
  misc_feature (1)..(165): NCBI GI NO: 34910488 NR Description: putative H+-transporting ATP synthase
  misc_feature (1)..(165): NCBI GI NO: 2493132 NR Description: Vacuolar ATP synthase subunit B isoform 2
  misc_feature (1)..(165): NCBI GI NO: 2493130 NR Description: Vacuolar ATP synthase subunit B isoform 2
  misc_feature (1)..(165): NCBI GI NO: 2493131 NR Description: Vacuolar ATP synthase subunit B isoform 1
  misc_feature (1)..(165): NCBI GI NO: 29424043 NR Description: vacuolar H(+)-ATPase subunit B
  misc_feature (1)..(165): NCBI GI NO: 15010616 NR Description: AT4g38510/F20M13_70 [Arabidopsis thaliana]
  misc_feature (1)..(165): NCBI GI NO: 26986106 NR Description: vacuolar ATPase subunit B
  misc_feature (1)..(165): NCBI GI NO: 15233891 NR Description: probable H+-transporting ATPase
  misc_feature (1)..(164): NCBI GI NO: 81637 NR Description: H+-exporting ATPase (EC 3
GSITQIPILTMPNDDITHPTPDLTGYITEGQIYIDRQLHNRQIYPPINVLPSLSRLMKSAIGEGMTRRDHSDVSNQLYANYAIGKDVQAMKAVVGEEALSSEDLLYLEFLDKFERKFVTQGAYDTRNIFQSLDLAWTLLRIFPRELLHRIPAKTLDQYYSRDASH

SEQ ID NO: 41138 - protein, 155 aa, Zea mays subsp. mays
  peptide (1)..(155): Ceres Seq. ID no. 12340399
  misc_feature (1)..(155): NCBI GI NO: 14150751 NR Description: vacuolar ATPase B subunit [Oryza sativa]
  misc_feature (1)..(155): NCBI GI NO: 34910488 NR Description: putative H+-transporting ATP synthase
  misc_feature (1)..(155): NCBI GI NO: 2493132 NR Description: Vacuolar ATP synthase subunit B isoform 2
  misc_feature (1)..(155): NCBI GI NO: 2493130 NR Description: Vacuolar ATP synthase subunit B isoform 2
  misc_feature (1)..(155): NCBI GI NO: 2493131 NR Description: Vacuolar ATP synthase subunit B isoform 1
  misc_feature (1)..(155): NCBI GI NO: 29424043 NR Description: vacuolar H(+)-ATPase subunit B
  misc_feature (1)..(155): NCBI GI NO: 15010616 NR Description: AT4g38510/F20M13_70 [Arabidopsis thaliana]
  misc_feature (1)..(155): NCBI GI NO: 15233891 NR Description: probable H+-transporting ATPase
  misc_feature (1)..(155): NCBI GI NO: 26986106 NR Description: vacuolar ATPase subunit B
  misc_feature (1)..(154): NCBI GI NO: 81637 NR Description: H+-exporting ATPase (EC 3
MPNDDITHPTPDLTGYITEGQIYIDRQLHNRQIYPPINVLPSLSRLMKSAIGEGMTRRDHSDVSNQLYANYAIGKDVQAMKAVVGEEALSSEDLLYLEFLDKFERKFVTQGAYDTRNIFQSLDLAWTLLRIFPRELLHRIPAKTLDQYYSRDASH

SEQ ID NO: 41139 - protein, 109 aa, Zea mays subsp. mays
  peptide (1)..(109): Ceres Seq. ID no. 12340400
  misc_feature (1)..(109): NCBI GI NO: 14150751 NR Description: vacuolar ATPase B subunit [Oryza sativa]
  misc_feature (1)..(109): NCBI GI NO: 34910488 NR Description: putative H+-transporting ATP synthase
  misc_feature (1)..(109): NCBI GI NO: 2493132 NR Description: Vacuolar ATP synthase subunit B isoform 2
  misc_feature (1)..(109): NCBI GI NO: 2493130 NR Description: Vacuolar ATP synthase subunit B isoform 2
  misc_feature (1)..(109): NCBI GI NO: 2493131 NR Description: Vacuolar ATP synthase subunit B isoform 1
  misc_feature (1)..(109): NCBI GI NO: 29424043 NR Description: vacuolar H(+)-ATPase subunit B
  misc_feature (1)..(109): NCBI GI NO: 15010616 NR Description: AT4g38510/F20M13_70 [Arabidopsis thaliana]
  misc_feature (1)..(109): NCBI GI NO: 15233891 NR Description: probable H+-transporting ATPase
  misc_feature (1)..(109): NCBI GI NO: 26986106 NR Description: vacuolar ATPase subunit B
  misc_feature (1)..(108): NCBI GI NO: 81637 NR Description: H+-exporting ATPase (EC 3
MKSAIGEGMTRRDHSDVSNQLYANYAIGKDVQAMKAVVGEEALSSEDLLYLEFLDKFERKFVTQGAYDTRNIFQSLDLAWTLLRIFPRELLHRIPAKTLDQYYSRDASH

SEQ ID NO: 41140 - DNA, 478 bp, Zea mays subsp. mays
  misc_feature (1)..(478): Ceres Seq. ID no. 5761763
  misc_feature (399)..(399): n is a, c, t, g, unknown, or other
  misc_feature (395)..(395): n is a, c, t, g, unknown, or other
  misc_feature (405)..(405): n is a, c, t, g, unknown, or other
gccgattagcaccagtctgatgataaacctgcttcgcgcttctgtatgtcatgtgcagggggtactaccgctgcagcagctccaaggggtgcccagcgaggaagcaggtggagcgcagccacgcggaccccaccgcgctgctcgtcacctacaccttcgagcacaatcacgaggcgccgcagcccaagagcagcggcggcagctgctgccaccagcaaggcaagccgtccgcgcggccgccggaggagtgggagcgggagctgcagggggaggacgccctgttcgcggggctcggcgagctgcccgagtgcgccgtcgtcttcggccgccgccgcgagctcagcctggccgccaccgcgccgtgctcctgatggtccttcgactctttttacgtntgtnttyatntttttttcttttccttttgggccctctttaagttttacacggaacgatttggaggcactggtacatagctctg

SEQ ID NO: 41141 - protein, 144 aa, Zea mays subsp. mays
  peptide (1)..(144): Ceres Seq. ID no. 5761764
  misc_feature (132)..(132): Xaa is any aa, unknown or other
  misc_feature (133)..(133): Xaa is any aa, unknown or other
  misc_feature (134)..(134): Xaa is any aa, unknown or other
  misc_feature (135)..(135): Xaa is any aa, unknown or other
PISTSLMINLLRASVCHVQGVLPLQQLQGVPSEEAGGAQPRGPHRAARHLHLRAQSRGAAAQEQRRQLLPPARQAVRAAAGGVGAGAAGGGRPVRGARRAARVRRRLRPPPRAQPGRHRAVLLMVLRLFLRXXXXFFLFLLGPL

SEQ ID NO: 41142 - protein, 144 aa, Zea mays subsp. mays
  peptide (1)..(144): Ceres Seq. ID no. 5761765
  misc_feature (117)..(117): Xaa is any aa, unknown or other
  misc_feature (118)..(118): Xaa is any aa, unknown or other
  misc_feature (119)..(119): Xaa is any aa, unknown or other
  misc_feature (120)..(120): Xaa is any aa, unknown or other
MSCAGGTTAAAAPRGAQRGSRWSAATRTPPRCSSPTPSSTITRRRSPRAAAAAAATSKASRPRGRRRSGSGSCRGRTPCSRGSASCPSAPSSSAAAASSAWPPPRRAPDGPSTLFTXXXXFFSFPFGPSLSFTRNDLEALVHSS

SEQ ID NO: 41143 - protein, 138 aa, Zea mays subsp. mays
  peptide (1)..(138): Ceres Seq. ID no. 5761766
  misc_feature (126)..(126): Xaa is any aa, unknown or other
  misc_feature (127)..(127): Xaa is any aa, unknown or other
  misc_feature (128)..(128): Xaa is any aa, unknown or other
  misc_feature (129)..(129): Xaa is any aa, unknown or other
MINLLRASVCHVQGVLPLQQLQGVPSEEAGGAQPRGPHRAARHLHLRAQSRGAAAQEQRRQLLPPARQAVRAAAGGVGAGAAGGGRPVRGARRAARVRRRLRPPPRAQPGRHRAVLLMVLRLFLRXXXXFFLFLLGPL

SEQ ID NO: 41144 - protein, 106 aa, Zea mays subsp. mays
  peptide (1)..(106): Ceres Seq. ID no. 5761767
  misc_feature (3)..(65): NCBI GI NO: 34909540 NR Description: P0481E12.40
  misc_feature (63)..(106): NCBI GI NO: 34909540 NR Description: P0481E12.40
  misc_feature (3)..(75): NCBI GI NO: 34910854 NR Description: P0435H01.23
  misc_feature (74)..(94): NCBI GI NO: 34910854 NR Description: P0435H01.23
  misc_feature (3)..(102): NCBI GI NO: 22329838 NR Description: WRKY family transcription factor
  misc_feature (1)..(85): NCBI GI NO: 11357269 NR Description: DNA-binding WRKY-like protein
  misc_feature (3)..(85): NCBI GI NO: 22331854 NR Description: WRKY family transcription factor
  misc_feature (3)..(85): NCBI GI NO: 30694863 NR Description: WRKY family transcription factor
  misc_feature (3)..(63): NCBI GI NO: 27817201 NR Description: WRKY transcription factor 22 [Capsella rubella]
  misc_feature (3)..(51): NCBI GI NO: 37537178 NR Description: putative DNA-binding protein
MCRGYYRCSSSKGCPARKQVERSHADPTALLVTYTFEHNHEAPQPKSSGGSCCHQQGKPSARPPEEWERELQGEDALFAGLGELPECAVVFGRRRELSLAATAPCS

SEQ ID NO: 41145 - DNA, 708 bp, Zea mays subsp. mays
  misc_feature (1)..(708): Ceres Seq. ID no. 12462432
agcccagtactccttgctccacgccgccgctcaaaaccggcagaagtaagaacggggagggaagcacgccccaaacgttccgaggtttcgcctctcggagcgcaccaacgccacccggagcgactcgccaccggcgcggagaaggagggcggaggctaggcgatggcggacgagaattaggctgggaagaaagaggaagaggaatttagcacaggccctctgtcagtactaatgatgagtgttaagaacaacacccaggttctcatcaattgccgcaacaacaagaagctgcttggccgggttcgtgcttttgatcgccactgtaacatggtgctcgagaacgtgcgggagatgtggacagaggtccccaagactggcaagggcaaaaagaaggctctgcctgtgaacaaggatagattcatcagcaagatgttcctcaggggcgactcggtcatcatcgtgctgaggaaccccaagtgatcgcccaaccggaagccaggtctctgttgaaaactgtagcttatgatgtatgttggggatgattaactggttatcttgaactgacgttcatgtggcatcgcaatggcacatgaacatacggcgttccatgagtttgttaaccggagtatgaacctaccacctgcggtatttgatccctgaatgttgagtttgcacttctgcttattattgccttgccccaccgtgttc

SEQ ID NO: 41146 - protein, 82 aa, Zea mays subsp. mays; identical to SEQ ID NO: 34174
  peptide (1)..(82): Ceres Seq. ID no. 12462433
  misc_feature (1)..(79): Pfam Name: Pfam Description:  LSM domain
  misc_feature (1)..(82): NCBI GI NO: 18407411 NR Description: putative small nuclear ribonucleoprotein D2
  misc_feature (1)..(82): NCBI GI NO: 21554692 NR Description: small nuclear ribonucleoprotein-like protein
  misc_feature (1)..(82): NCBI GI NO: 30690747 NR Description: small nuclear ribonucleo protein D2 -related
  misc_feature (1)..(81): NCBI GI NO: 4759158 NR Description: small nuclear ribonucleoprotein polypeptide D2
  misc_feature (1)..(81): NCBI GI NO: 26337731 NR Description: unnamed protein product [Mus musculus]
  misc_feature (1)..(81): NCBI GI NO: 21357623 NR Description: CG1249-PA [Drosophila melanogaster]
  misc_feature (1)..(81): NCBI GI NO: 22203734 NR Description: small nuclear ribonucleoprotein D2-like protein
  misc_feature (1)..(81): NCBI GI NO: 27677236 NR Description: similar to Small nuclear ribonucleoprotein Sm D2
  misc_feature (1)..(81): NCBI GI NO: 39592141 NR Description: Hypothetical protein CBG23345
  misc_feature (1)..(81): NCBI GI NO: 34881247 NR Description: similar to SNF2/RAD54 family protein

SEQ ID NO: 41147 - protein, 81 aa, Zea mays subsp. mays; identical to SEQ ID NO: 12232
  peptide (1)..(81): Ceres Seq. ID no. 12462434
  misc_feature (1)..(78): Pfam Name: Pfam Description:  LSM domain
  misc_feature (1)..(81): NCBI GI NO: 18407411 NR Description: putative small nuclear ribonucleoprotein D2
  misc_feature (1)..(81): NCBI GI NO: 21554692 NR Description: small nuclear ribonucleoprotein-like protein
  misc_feature (1)..(81): NCBI GI NO: 30690747 NR Description: small nuclear ribonucleo protein D2 -related
  misc_feature (1)..(80): NCBI GI NO: 4759158 NR Description: small nuclear ribonucleoprotein polypeptide D2
  misc_feature (1)..(80): NCBI GI NO: 26337731 NR Description: unnamed protein product [Mus musculus]
  misc_feature (1)..(80): NCBI GI NO: 21357623 NR Description: CG1249-PA [Drosophila melanogaster]
  misc_feature (1)..(80): NCBI GI NO: 22203734 NR Description: small nuclear ribonucleoprotein D2-like protein
  misc_feature (1)..(80): NCBI GI NO: 27677236 NR Description: similar to Small nuclear ribonucleoprotein Sm D2
  misc_feature (1)..(80): NCBI GI NO: 39592141 NR Description: Hypothetical protein CBG23345
  misc_feature (1)..(80): NCBI GI NO: 34881247 NR Description: similar to SNF2/RAD54 family protein

SEQ ID NO: 41148 - protein, 68 aa, Zea mays subsp. mays
  peptide (1)..(68): Ceres Seq. ID no. 12462435
PSTPCSTPPLKTGRSKNGEGSTPQTFRGFASRSAPTPPGATRHRRGEGGRRLGDGGRELGWEERGRGI

SEQ ID NO: 41149 - DNA, 947 bp, Zea mays subsp. mays
  misc_feature (1)..(947): Ceres Seq. ID no. 14305114
atcacccctcgttgtcatctcatatcctgagccagagatcaaagaaaccagagggagcgaggcatggcagcaggcttgcaggtgtttggccagccggcgtctactgatgtctccagggttctgacatgcctgtttgagaagaaactggagttcgatcttgtccgcatcgatacgttcaagacgcatcacaagcttcccgagttcatcaggcttcgggatcctaatgggcaagtgaccttgaagcacggcgacaaaactctcgttgattcgagggacatctgccggtacgtctgcacccagtttccaaacgatggaaacaagagcctttacggatccggcgctctagaacgggcgtcgatagaacagtggcttcaggcggaggctcagaacttcgggccccccagctccgcgctcgtcttccagctggcgttcgtccctcacctcactcacctgggcgttcgtcaggaccctgccgtgatcgccgagaacgaggataagctgaagcaggtccttgatgtctacgacgagatactctcgaggaacgagtacctggctggcgacgagttcaccctggccgacctctcccacctcccgaactcgcactacatcgtgaacaccgagagaggaaggaagctcttcactaacaagaagaacgtggccaagtggtacgagaagctctcgaagcgcgagacgtggaagcaggtcgctaagatgcagaaggaacatcctggtgcgttcgagtgattgcttgtcttggggggagctgcgagtgcaccatcatgaatggcttcatcgtctgtgtcggtctggctctacagttcattttgttttgagtgatccattgtttaattcctcctatcagtgttgtcgtgtgcaccaaaaataatgtgaagcccagctgtgatgtatatgatccttttgctctaatctatcatgacgtataagct

SEQ ID NO: 41150 - protein, 226 aa, Zea mays subsp. mays; identical to SEQ ID NO: 34015
  peptide (1)..(226): Ceres Seq. ID no. 14305115
  misc_feature (97)..(209): Pfam Name: Pfam Description:  Glutathione S-transferase, C-terminal domain
  misc_feature (1)..(226): NCBI GI NO: 11385469 NR Description: glutathione S-transferase GST 9 [Zea mays]
  misc_feature (1)..(226): NCBI GI NO: 11385475 NR Description: glutathione S-transferase GST 12 [Zea mays]
  misc_feature (1)..(226): NCBI GI NO: 11385477 NR Description: glutathione S-transferase GST 13 [Zea mays]
  misc_feature (1)..(226): NCBI GI NO: 22758269 NR Description: Putative glutathione S-transferase
  misc_feature (131)..(226): NCBI GI NO: 22758268 NR Description: Putative glutathione S-transferase
  misc_feature (1)..(75): NCBI GI NO: 22758268 NR Description: Putative glutathione S-transferase
  misc_feature (1)..(128): NCBI GI NO: 37536564 NR Description: putative glutathione S-transferase
  misc_feature (132)..(224): NCBI GI NO: 37536564 NR Description: putative glutathione S-transferase
  misc_feature (1)..(218): NCBI GI NO: 11177845 NR Description: putative glutathione S-transferase OsGSTF3
  misc_feature (1)..(218): NCBI GI NO: 22758267 NR Description: Putative glutathione S-transferase

SEQ ID NO: 41151 - DNA, 1175 bp, Zea mays subsp. mays
  misc_feature (1)..(1175): Ceres Seq. ID no. 12359182
ctattgatttgtgctttactccatttatcatcatttagttttgcatacatgttgagactgtgcacttgtcaaactacatgattgatattaataaagcttgggcggctaaactatgcctggatgttgggtgggggcagggatgcattttctgggggttgttattatttgtttgaaatctgattcaggtcccacattcaaccgggccttatgtgattagttgtaagctgacatgaagatgatgcttttgtaggttcatcctcccagcttcgttaattgctatcaatgatgttgctgcatatttctttgggttcttctttgggaaaacaccactgatcaagctctctccaaagaaaacatgggaaggctttataggtgcatcagtgacaacattgctttctgcatttgtggttgctaatttcatgggccatttccagtggttaacatgcccaagaaaggatctatcaactggatggctttattgtgacccaggtcccatgtttacaccagaaggttatgatctaccgggatggataccacaatggtttccatggcgagaaattgcaattatgcccgttcaatggcatgcattagctcttggcttgtttgcttcaataatagcaccatttggtggcttttttgcaagtggattcaagagggcattcaaatttaaggattttggggacagcatacctggtcatggtggatttacagataggatggactgccaaatggtcatggctgtttttgcgtacatctattaccaatcatttgtaatggtacaggacttatctgttgagacaatcctggagcagatactacgtaatctcacctttgaggagcagcgtgagctatatggacagctaggcaagttacttgtgagagcgaactgaagctaacagtggccgtggaagcacctaatccaaaaggataatgcgcaatgctttttcaggccttgcttttttgttaatcttcttgtacagccctagcacccctaaggatgaaacgaagaaccacaacgctgacagggatcgcatcgctgtatgacgttttggagcatacagctcctcccgtctttttcagagatttgtgtcacctttttgatttgcttctggtgctacgcttgttgccgcatcaaaaccagctaacgctgttttgtcgtgtcaatggtttatttg

SEQ ID NO: 41152 - protein, 156 aa, Zea mays subsp. mays
  peptide (1)..(156): Ceres Seq. ID no. 12359183
  misc_feature (1)..(156): NCBI GI NO: 20303635 NR Description: putative CDP-diacylglycerol synthetase
  misc_feature (1)..(152): NCBI GI NO: 3121837 NR Description: Phosphatidate cytidylyltransferase
  misc_feature (1)..(152): NCBI GI NO: 30696710 NR Description: phosphatidate cytidylyltransferase (CDS)
  misc_feature (1)..(152): NCBI GI NO: 7484839 NR Description: CDP-diacylglycerol synthetase homolog F24O1
  misc_feature (1)..(152): NCBI GI NO: 15236874 NR Description: putative CDP-diacylglycerol synthetase
  misc_feature (1)..(152): NCBI GI NO: 15235611 NR Description: CDP-diacylglycerol synthetase-like protein
  misc_feature (13)..(103): NCBI GI NO: 37532798 NR Description: putative phosphatidate cytidylyltransferase
  misc_feature (121)..(156): NCBI GI NO: 37532798 NR Description: putative phosphatidate cytidylyltransferase
  misc_feature (1)..(152): NCBI GI NO: 40743157 NR Description: hypothetical protein AN5166.2
  misc_feature (1)..(148): NCBI GI NO: 7676150 NR Description: PHOSPHATIDATE CYTIDYLYLTRANSFERASE 1
MGHFQWLTCPRKDLSTGWLYCDPGPMFTPEGYDLPGWIPQWFPWREIAIMPVQWHALALGLFASIIAPFGGFFASGFKRAFKFKDFGDSIPGHGGFTDRMDCQMVMAVFAYIYYQSFVMVQDLSVETILEQILRNLTFEEQRELYGQLGKLLVRAN

SEQ ID NO: 41153 - protein, 131 aa, Zea mays subsp. mays
  peptide (1)..(131): Ceres Seq. ID no. 12359184
  misc_feature (1)..(131): NCBI GI NO: 20303635 NR Description: putative CDP-diacylglycerol synthetase
  misc_feature (1)..(127): NCBI GI NO: 3121837 NR Description: Phosphatidate cytidylyltransferase
  misc_feature (1)..(127): NCBI GI NO: 30696710 NR Description: phosphatidate cytidylyltransferase (CDS)
  misc_feature (1)..(127): NCBI GI NO: 7484839 NR Description: CDP-diacylglycerol synthetase homolog F24O1
  misc_feature (1)..(127): NCBI GI NO: 15236874 NR Description: putative CDP-diacylglycerol synthetase
  misc_feature (1)..(127): NCBI GI NO: 15235611 NR Description: CDP-diacylglycerol synthetase-like protein
  misc_feature (1)..(78): NCBI GI NO: 37532798 NR Description: putative phosphatidate cytidylyltransferase
  misc_feature (96)..(131): NCBI GI NO: 37532798 NR Description: putative phosphatidate cytidylyltransferase
  misc_feature (1)..(127): NCBI GI NO: 40743157 NR Description: hypothetical protein AN5166.2
  misc_feature (1)..(123): NCBI GI NO: 7676150 NR Description: PHOSPHATIDATE CYTIDYLYLTRANSFERASE 1
MFTPEGYDLPGWIPQWFPWREIAIMPVQWHALALGLFASIIAPFGGFFASGFKRAFKFKDFGDSIPGHGGFTDRMDCQMVMAVFAYIYYQSFVMVQDLSVETILEQILRNLTFEEQRELYGQLGKLLVRAN

SEQ ID NO: 41154 - protein, 107 aa, Zea mays subsp. mays
  peptide (1)..(107): Ceres Seq. ID no. 12359185
  misc_feature (1)..(107): NCBI GI NO: 20303635 NR Description: putative CDP-diacylglycerol synthetase
  misc_feature (1)..(103): NCBI GI NO: 3121837 NR Description: Phosphatidate cytidylyltransferase
  misc_feature (1)..(103): NCBI GI NO: 30696710 NR Description: phosphatidate cytidylyltransferase (CDS)
  misc_feature (1)..(103): NCBI GI NO: 7484839 NR Description: CDP-diacylglycerol synthetase homolog F24O1
  misc_feature (1)..(103): NCBI GI NO: 15236874 NR Description: putative CDP-diacylglycerol synthetase
  misc_feature (1)..(103): NCBI GI NO: 15235611 NR Description: CDP-diacylglycerol synthetase-like protein
  misc_feature (1)..(54): NCBI GI NO: 37532798 NR Description: putative phosphatidate cytidylyltransferase
  misc_feature (72)..(107): NCBI GI NO: 37532798 NR Description: putative phosphatidate cytidylyltransferase
  misc_feature (1)..(103): NCBI GI NO: 40743157 NR Description: hypothetical protein AN5166.2
  misc_feature (1)..(99): NCBI GI NO: 7676150 NR Description: PHOSPHATIDATE CYTIDYLYLTRANSFERASE 1
MPVQWHALALGLFASIIAPFGGFFASGFKRAFKFKDFGDSIPGHGGFTDRMDCQMVMAVFAYIYYQSFVMVQDLSVETILEQILRNLTFEEQRELYGQLGKLLVRAN

SEQ ID NO: 41155 - DNA, 1205 bp, Zea mays subsp. mays
  misc_feature (1)..(1205): Ceres Seq. ID no. 12364538
gcacgagaccattacctagaacatcctaatcgaaaaataagccgcgcccgcctccgcacgccccgctccgatggcagccgcggctgtgaccctgccctcctcgggcacgcccttcgccgtcgccacaaccgcctcttcctcatccgcccgccgctgcctgctcctgccctccgcggctccccgccgagctctccgcgtcgtggcctccgccgctaccgaggcgccgcccaagcccacgcagccgccgacatcgccctccggcatcgtgctcgtcgacccatccgaagcccagaaggtgcaccggctcaaggccgtctacgaccagaaggtcgtcccgctcatcaccgaggagttcggctacaccaatgtccaccaggttcccaagctcgagaagattgtggtgaactgcggtctgggcgcggaggcagggaactcgaaggggctggatgccgccatgaaggacctggccatgatcaccgggcagtggcccgtcaagaccaaggccaggaagtccgtggccagcttcaagatccgtgagggaaacaccatcggtatcgcagtcaccctccgcggcaggataatgtacaacttcctggataggctcatcaaccttgggctccctaggaccatggacttcctgggtgtcaaccccaacagcttcgacgggcacggcaactacagccttggcctccgtgaccagggcgtgttcccggagatcccgtacgaggtgggcgggaagaagaacggcatggacgtgtccatcgtcaccagcgccaagacggacaacgaggcgttcaggctgctggtcctcctcggcatgccattctcggagaacatcaagaccgacgtggtgatccggaagaagaggttgaaccgccaccacttcctgagcaagggcaaggggaagggaggacgacggtgaggagaggaaccagccagccagccagcccatggttgcacacgctctgttcagcttgttttaattccgatctttttgcagaatttggcttacaaattcgatgctgttgttgtctgtcaattatgtaacttgtgcacctatgaaaaaggtttgcaatgatcatgtccgttttgctgatttcttcttgatgcataatttgtagtcacaagttataccactgccagacattgtaatcggaggaagcagtaatgtgagacggacactgtaatgcaaacgtatttcagct

SEQ ID NO: 41156 - protein, 283 aa, Zea mays subsp. mays
  peptide (1)..(283): Ceres Seq. ID no. 12364539
  misc_feature (159)..(253): Pfam Name: Pfam Description:  ribosomal L5P family C-terminus
  misc_feature (2)..(279): NCBI GI NO: 3777600 NR Description: 50S ribosomal protein L5 [Oryza sativa]
  misc_feature (13)..(279): NCBI GI NO: 15234136 NR Description: putative L5 ribosomal protein
  misc_feature (74)..(279): NCBI GI NO: 7582405 NR Description: plastid ribosomal protein PRPL5
  misc_feature (69)..(252): NCBI GI NO: 16329929 NR Description: 50S ribosomal protein L5
  misc_feature (78)..(252): NCBI GI NO: 3123273 NR Description: 50S RIBOSOMAL PROTEIN L5
  misc_feature (78)..(254): NCBI GI NO: 20808648 NR Description: Ribosomal protein L5
  misc_feature (76)..(254): NCBI GI NO: 11466362 NR Description: ribosomal protein L5 [Mesostigma viride]
  misc_feature (78)..(255): NCBI GI NO: 22297637 NR Description: 50S ribosomal protein L5
  misc_feature (78)..(254): NCBI GI NO: 17231695 NR Description: 50S ribosomal protein L5 [Nostoc sp. PCC 7120]
  misc_feature (79)..(255): NCBI GI NO: 23042780 NR Description: hypothetical protein
MAAAAVTLPSSGTPFAVATTASSSSARRCLLLPSAAPRRALRVVASAATEAPPKPTQPPTSPSGIVLVDPSEAQKVHRLKAVYDQKVVPLITEEFGYTNVHQVPKLEKIVVNCGLGAEAGNSKGLDAAMKDLAMITGQWPVKTKARKSVASFKIREGNTIGIAVTLRGRIMYNFLDRLINLGLPRTMDFLGVNPNSFDGHGNYSLGLRDQGVFPEIPYEVGGKKNGMDVSIVTSAKTDNEAFRLLVLLGMPFSENIKTDVVIRKKRLNRHHFLSKGKGKGGRR

SEQ ID NO: 41157 - protein, 178 aa, Zea mays subsp. mays
  peptide (1)..(178): Ceres Seq. ID no. 12364540
  misc_feature (50)..(178): Pfam Name: Pfam Description:  High molecular weight glutenin subunit
ARDHYLEHPNRKISRARLRTPRSDGSRGCDPALLGHALRRRHNRLFLIRPPLPAPALRGSPPSSPRRGLRRYRGAAQAHAAADIALRHRARRPIRSPEGAPAQGRLRPEGRPAHHRGVRLHQCPPGSQAREDCGELRSGRGGRELEGAGCRHEGPGHDHRAVARQDQGQEVRGQLQDP

SEQ ID NO: 41158 - protein, 155 aa, Zea mays subsp. mays
  peptide (1)..(155): Ceres Seq. ID no. 12364541
  misc_feature (31)..(125): Pfam Name: Pfam Description:  ribosomal L5P family C-terminus
  misc_feature (1)..(151): NCBI GI NO: 3777600 NR Description: 50S ribosomal protein L5 [Oryza sativa]
  misc_feature (1)..(151): NCBI GI NO: 15234136 NR Description: putative L5 ribosomal protein
  misc_feature (1)..(151): NCBI GI NO: 7582405 NR Description: plastid ribosomal protein PRPL5
  misc_feature (1)..(124): NCBI GI NO: 16329929 NR Description: 50S ribosomal protein L5
  misc_feature (1)..(124): NCBI GI NO: 3123273 NR Description: 50S RIBOSOMAL PROTEIN L5
  misc_feature (1)..(126): NCBI GI NO: 20808648 NR Description: Ribosomal protein L5
  misc_feature (1)..(126): NCBI GI NO: 11466362 NR Description: ribosomal protein L5 [Mesostigma viride]
  misc_feature (1)..(127): NCBI GI NO: 22297637 NR Description: 50S ribosomal protein L5
  misc_feature (1)..(126): NCBI GI NO: 17231695 NR Description: 50S ribosomal protein L5 [Nostoc sp. PCC 7120]
  misc_feature (1)..(127): NCBI GI NO: 23042780 NR Description: hypothetical protein
MKDLAMITGQWPVKTKARKSVASFKIREGNTIGIAVTLRGRIMYNFLDRLINLGLPRTMDFLGVNPNSFDGHGNYSLGLRDQGVFPEIPYEVGGKKNGMDVSIVTSAKTDNEAFRLLVLLGMPFSENIKTDVVIRKKRLNRHHFLSKGKGKGGRR

SEQ ID NO: 41159 - DNA, 1098 bp, Zea mays subsp. mays
  misc_feature (1)..(1098): Ceres Seq. ID no. 13494528
  misc_feature (721)..(721): n is a, c, t, g, unknown, or other
gcacgtttctctgcgactcgcacggcccgcgcccaccaccgaccaccccacctggttcggtcggcactcggcaccccgccccgcatacatgccgccgcccagcctcaccgtggcgcgcgacccggccgccgccgccaccacgcggcaccgcaaggtccacccgacgccgggcggaggcgcagggacgacgaaggagatgggcgcggcggaggggtgggcgcggcccgagtggtgctcggcggcgggcgccgcggccgtgctgcggcggcacccggcgcccgcgctcttcgggtgcggcctcctgctcttcatggccgtcgagtacaccatccccatggtcaggccggacgcgccgccgctcgacctgggcttcgtcgccaccaggggcttgcacgccgccgtcgccgcgaggccctggctcaactcgctcctcgccgcgctcaacacggtcttcgtcgcgatgcaggcggcgtacatcctgtgggccatcctcggcgagcagcggccgcgcgccgccgtcgccacgctcatgatgttcacctgccggggcgcgctgggctgcgccacccagctcccgctgccggaggagttcctggggtccgggatggacttccccgtgggcaacgtctccttcttcctcttcttctcgggccacgtcgcgggcgcggtcatcgcggccgccgacatgcgccgcgagggccggctggcgctggcgcgcctntacgacgcgctcaacgcgctccagggggtcaggctgctggcgtgcaggggacactacaccatcgacctggccgtcggtgtcggagcggggatcctcttcgatacgctctccggatggtacttccacgccaagaacgcaccggagaagcactgccgcagctgccagtgccacaaggctctcctttcacgctagctcataggtgtggtgtgtttggtaagttactgtagcggtgctgttttgtaagaaatggttttgattgccagtcgttgtgatagttttcatcgcgggtttataatacgaatcgactgagaactattttcgccaacgattcgatatactaaccgttgtgaaaaatatgttataggtgtatttatcct

SEQ ID NO: 41160 - protein, 315 aa, Zea mays subsp. mays
  peptide (1)..(315): Ceres Seq. ID no. 13494529
  misc_feature (42)..(273): NCBI GI NO: 22959756 NR Description: hypothetical protein [Rhodobacter sphaeroides]
  misc_feature (6)..(266): NCBI GI NO: 23105035 NR Description: hypothetical protein [Azotobacter vinelandii]
  misc_feature (241)..(241): Xaa is any aa, unknown or other
ARFSATRTARAHHRPPHLVRSALGTPPRIHAAAQPHRGARPGRRRHHAAPQGPPDAGRRRRDDEGDGRGGGVGAARVVLGGGRRGRAAAAPGARALRVRPPALHGRRVHHPHGQAGRAAARPGLRRHQGLARRRRREALAQLAPRRAQHGLRRDAGGVHPVGHPRRAAAARRRRHAHDVHLPGRAGLRHPAPAAGGVPGVRDGLPRGQRLLLPLLLGPRRGRGHRGRRHAPRGPAGAGAPXRRAQRAPGGQAAGVQGTLHHRPGRRCRSGDPLRYALRMVLPRQERTGEALPQLPVPQGSPFTLAHRCGVFGKLL

SEQ ID NO: 41161 - protein, 303 aa, Zea mays subsp. mays
  peptide (1)..(303): Ceres Seq. ID no. 13494530
  misc_feature (77)..(280): NCBI GI NO: 13926235 NR Description: AT3g15820/MSJ11_22 [Arabidopsis thaliana]
  misc_feature (77)..(280): NCBI GI NO: 18400910 NR Description: phosphatidic acid phosphatase (PAP2)-related
  misc_feature (86)..(303): NCBI GI NO: 15232701 NR Description: phosphatidic acid phosphatase (PAP2)-related
  misc_feature (240)..(240): Xaa is any aa, unknown or other
HVSLRLARPAPTTDHPTWFGRHSAPRPAYMPPPSLTVARDPAAAATTRHRKVHPTPGGGAGTTKEMGAAEGWARPEWCSAAGAAAVLRRHPAPALFGCGLLLFMAVEYTIPMVRPDAPPLDLGFVATRGLHAAVAARPWLNSLLAALNTVFVAMQAAYILWAILGEQRPRAAVATLMMFTCRGALGCATQLPLPEEFLGSGMDFPVGNVSFFLFFSGHVAGAVIAAADMRREGRLALARXYDALNALQGVRLLACRGHYTIDLAVGVGAGILFDTLSGWYFHAKNAPEKHCRSCQCHKALLSR

SEQ ID NO: 41162 - protein, 274 aa, Zea mays subsp. mays
  peptide (1)..(274): Ceres Seq. ID no. 13494531
  misc_feature (48)..(251): NCBI GI NO: 13926235 NR Description: AT3g15820/MSJ11_22 [Arabidopsis thaliana]
  misc_feature (48)..(251): NCBI GI NO: 18400910 NR Description: phosphatidic acid phosphatase (PAP2)-related
  misc_feature (57)..(274): NCBI GI NO: 15232701 NR Description: phosphatidic acid phosphatase (PAP2)-related
  misc_feature (211)..(211): Xaa is any aa, unknown or other
MPPPSLTVARDPAAAATTRHRKVHPTPGGGAGTTKEMGAAEGWARPEWCSAAGAAAVLRRHPAPALFGCGLLLFMAVEYTIPMVRPDAPPLDLGFVATRGLHAAVAARPWLNSLLAALNTVFVAMQAAYILWAILGEQRPRAAVATLMMFTCRGALGCATQLPLPEEFLGSGMDFPVGNVSFFLFFSGHVAGAVIAAADMRREGRLALARXYDALNALQGVRLLACRGHYTIDLAVGVGAGILFDTLSGWYFHAKNAPEKHCRSCQCHKALLSR

SEQ ID NO: 41163 - DNA, 1158 bp, Zea mays subsp. mays
  misc_feature (1)..(1158): Ceres Seq. ID no. 12359329
cctccaaaccaaggcggccaagccccttccatttgccaggcggccacaccatctgatccccaattcgtttccacctatcgagctaaggtgcgacgacggcggtcgcagcgtcccctccctccctccgtaccgctgccgccggtctaccaaacggtgaaatatttacgtaagcgaatcagggtcttgaagatagcttccagatatgtggggttttgcatcaaatgcttgggcatccgggctggggaagaggagtcccccaaattgcacctcttcgagtgctgcttgttccgatgacgaagcatcctcgtgcacgagcagggaagaaggcctggaatgcccaatatgttgggagtctttcaatatagtggagaatgtgccttacgtgctatggtgcggccacaccctttgcaagaactgcgtcctaggacttcaatgggccgtcatcaaagttccaactgtgccgatgcagctacccttcttcgtttgctgtccctggtgcaacctcctgtcgcttcgcatactttacaaagggaacctcacgttcccacggaagaattatttcctcctctggatggttgaggggatgaatggtgagcgggccagatcacgcccagctactcacagcgagcaacatactccatggctctcaagcagcagcagagcaaatggaaatgcaggctgttcaaatcccacaagacgccaccttccgctgccaccgccggttgacactacttcgcccaccaatgcaaatcatgccaaccatggggtccctgtccctctgctgaacgcagagagagtacaagcttcgctgcgcaagtccttgtcgttcctggttcacctgaccgccaagtttcccctggtgttcatcttcctcctcatagtgctctatgcgatccctgccagcgcagcagtcttgctactgtacatccttatcacggtgctgttcgcgctcccctcgttcctgatactgtatttcgcgtatccgagcctggactggcttgttagggaaatctttgcctgagatttccttgttcggtaaaatctcaatactgttgttgagtccttgtataactgaaccttccctagatcttgttgcaagcgtggatgctattgcaaagttttggtttttacaccatgagatgtgtttacctcaagtcc

SEQ ID NO: 41164 - protein, 272 aa, Zea mays subsp. mays
  peptide (1)..(272): Ceres Seq. ID no. 12359330
  misc_feature (1)..(135): NCBI GI NO: 15228658 NR Description: unknown protein; protein id: At3g29270.1
  misc_feature (175)..(270): NCBI GI NO: 15228658 NR Description: unknown protein; protein id: At3g29270.1
  misc_feature (1)..(135): NCBI GI NO: 11994767 NR Description: RING zinc finger protein-like
  misc_feature (175)..(270): NCBI GI NO: 11994767 NR Description: RING zinc finger protein-like
  misc_feature (1)..(270): NCBI GI NO: 21594048 NR Description: unknown [Arabidopsis thaliana]
  misc_feature (1)..(270): NCBI GI NO: 18409246 NR Description: expressed protein; protein id: At1g69330
  misc_feature (1)..(270): NCBI GI NO: 15221223 NR Description: putative RING zinc finger protein
  misc_feature (1)..(270): NCBI GI NO: 21592563 NR Description: putative RING zinc finger protein
MWGFASNAWASGLGKRSPPNCTSSSAACSDDEASSCTSREEGLECPICWESFNIVENVPYVLWCGHTLCKNCVLGLQWAVIKVPTVPMQLPFFVCCPWCNLLSLRILYKGNLTFPRKNYFLLWMVEGMNGERARSRPATHSEQHTPWLSSSSRANGNAGCSNPTRRHLPLPPPVDTTSPTNANHANHGVPVPLLNAERVQASLRKSLSFLVHLTAKFPLVFIFLLIVLYAIPASAAVLLLYILITVLFALPSFLILYFAYPSLDWLVREIFA

SEQ ID NO: 41165 - protein, 185 aa, Zea mays subsp. mays
  peptide (1)..(185): Ceres Seq. ID no. 12359331
  misc_feature (1)..(48): NCBI GI NO: 15228658 NR Description: unknown protein; protein id: At3g29270.1
  misc_feature (88)..(183): NCBI GI NO: 15228658 NR Description: unknown protein; protein id: At3g29270.1
  misc_feature (1)..(48): NCBI GI NO: 11994767 NR Description: RING zinc finger protein-like
  misc_feature (88)..(183): NCBI GI NO: 11994767 NR Description: RING zinc finger protein-like
  misc_feature (1)..(183): NCBI GI NO: 21594048 NR Description: unknown [Arabidopsis thaliana]
  misc_feature (1)..(183): NCBI GI NO: 18409246 NR Description: expressed protein; protein id: At1g69330
  misc_feature (1)..(183): NCBI GI NO: 15221223 NR Description: putative RING zinc finger protein
  misc_feature (1)..(183): NCBI GI NO: 21592563 NR Description: putative RING zinc finger protein
MQLPFFVCCPWCNLLSLRILYKGNLTFPRKNYFLLWMVEGMNGERARSRPATHSEQHTPWLSSSSRANGNAGCSNPTRRHLPLPPPVDTTSPTNANHANHGVPVPLLNAERVQASLRKSLSFLVHLTAKFPLVFIFLLIVLYAIPASAAVLLLYILITVLFALPSFLILYFAYPSLDWLVREIFA

SEQ ID NO: 41166 - protein, 149 aa, Zea mays subsp. mays
  peptide (1)..(149): Ceres Seq. ID no. 12359332
  misc_feature (1)..(12): NCBI GI NO: 15228658 NR Description: unknown protein; protein id: At3g29270.1
  misc_feature (52)..(147): NCBI GI NO: 15228658 NR Description: unknown protein; protein id: At3g29270.1
  misc_feature (1)..(12): NCBI GI NO: 11994767 NR Description: RING zinc finger protein-like
  misc_feature (52)..(147): NCBI GI NO: 11994767 NR Description: RING zinc finger protein-like
  misc_feature (1)..(147): NCBI GI NO: 21594048 NR Description: unknown [Arabidopsis thaliana]
  misc_feature (1)..(147): NCBI GI NO: 18409246 NR Description: expressed protein; protein id: At1g69330
  misc_feature (1)..(147): NCBI GI NO: 15221223 NR Description: putative RING zinc finger protein
  misc_feature (1)..(147): NCBI GI NO: 21592563 NR Description: putative RING zinc finger protein
MVEGMNGERARSRPATHSEQHTPWLSSSSRANGNAGCSNPTRRHLPLPPPVDTTSPTNANHANHGVPVPLLNAERVQASLRKSLSFLVHLTAKFPLVFIFLLIVLYAIPASAAVLLLYILITVLFALPSFLILYFAYPSLDWLVREIFA

SEQ ID NO: 41167 - DNA, 3065 bp, Zea mays subsp. mays
  misc_feature (1)..(3065): Ceres Seq. ID no. 12375814
gcacgagaccattacctagaacatcctaaatcgaaaatcccaacatcgcccgctctctcctcgctgttctccgctgtcatctcccccggagaagcgtggctcctgtagccggcctcctacctgcccctcctccgcgcgccgagcaccagacgacgcgacacggccgagcacggtcgctgcttccgcggcggcgccgctccactctcgtgctgcagctagcggaacagagatccgtggggacatgaacagggtttctcctctctgttggtatgaactaaattgatcgatggtcctattgaatatagagctactattatatggcatattctgtcatgcaaatgatggtggttgtaagttgtgattgaggaactccattgtttgagaaatggatgaaacaccaactagttctgggcaatctgaagatagttcatgtgaacctaattggtggccaccagacttattagagaagatagagtctgcttccatatcaaggaaacatgatgttttgggtaatctaaggtcctcatcctggaaggcatcacaattactgtggtcaacaggatcttattcagggttaatccctaatggtttctattcaatcatcccggataaaaagttgaaggagactttcccaacaattccatcggtagatgacctgcaaactcttgaagcagatgggcttaaggctgacataattattgtagacactgagagggataagaaggttttcatgttgaagcagcttagtgctgcacttgtgaaagggttaagctctagcccagcattagtgataaagaaaatagcaggtttggtttttgactgcttcaagcgacaaaatcctgacgccagtccagcaaaaggctcgattgaagatactcatttctttggatataaaggaccacaacttctagggcagataagacatggatcatgccgacctcgagctattctatttaaagttcttgcagatgctgttggccttgagagtaaacttgtagttggtctacctgatgacggtgccgttggatttgtggactcctacaaacatatgtctgtggtagtttcgctaaactctatggaactgctagtggatcttatgcgatttccaggccagttgattccattttcagctaaggctatctttatatcgcatatatctgctgcgggtgaaagtgactcagctgaaaatgactcctgtgattctccccttgagcccaacagccctctgtatggattgtctgataaagttgaaactgaaggaattgaatcttcatcaaatctatctggacgatcactgcgtaatatgatgttgagatcaaggacattttctgaggggaaattaagcacgtcatgtagtgaaccgaatatagcgaatgccttttggaggcacagtcaaaggagaggagttgccgaggaaccccgtggtgctagttccagtcctgagcatccattaatgagagcaaggggaagatctatacttggtggtgagaagcaatcatttcaagaatacacagaatctggagctgcttcaagatcagatggtcttgggggcacttcaacctctaatgctcgaagaataaggcgtagaagcattagcatcacccctgagattggagatgacattgtgagggcagttcgggctatgaacgaaacactaaagcaaaatcgctttcaaagggatcatgtcgaaggttcatgctcatatgttacggaagaccaaagcaacgccaatgactgcccaaataaagatgatgcatctcggataattggtgctactgacagtgactcaagaaaccgaactggtcctactcaaaaggccatgtcattgccttcttcgcctcatgaatataggggtcaagatacccaaaaaggtgatgattttataagtaaagagaagatggcattggcatggaacaaagttttccagagctccccatttcttaacaagcccttgctgccgtttgaggaatggaacatagatttctctgagataacaattggcacgcgggttggaataggattcttcggagaagttttccgtggtatatggaatggaaccgatgttgccatcaaagtatttctagaacaggacttgacaactgaaaacatggaagatttttgcaacgagatatacatcctgagccggttgcgacatccaaacgttatattgtttcttggtgcatgcattacacctccacacttgtcaatggttactgaatatatggaaatgggatcactgtattatctcatccatatgagtggtcagaaaaagaaacttagttggcgtaggaggttgaaaattattcgtgatatatgcagggggttgatgtgcatacaccgcatgaagatagttcacagggatctcaaaagtgcaaactgcctggtgaacaaacattggactgttaagatatgtgactttggtctatctcgagtgatgattgatagtcctatgactgataattcctctgctggcaccccggaatggatggcccctgagcttatacggaatgaaccttttacagagaaatgtgatatattcagccttggtgttatcatgtgggagctgtgcacattgagtcgcccatgggaaggcatctccccagttcaagtggtgtacgcagttgctaatgaaggttcgcggcttgagattcctgaaggacctctcggcaggttgattgcagattgctgggcagagcctgagaatcggccgagctgccaggagatcctaacccgtttgctggactgcgaatacactgtcagctgaaatggaagctgctcgctcgtccactcaattcctgcacaggtggaaacatttcttgtataaaacctgtaaaaaaggctgccgattctgcggacttgaggtcacatatcgaagcgctgtgtttttttttaaacaatggcgaccctttctcaaaaaaaatgtaaaaatgattccctggttatagaagaacatgtctgattcgatagacgtgccttgcatcgcagggcaagctggttgttgtaccttattctagataagtagcacgcccgcgaatgctgttcggctttcaaatagctgcagctcc

SEQ ID NO: 41168 - protein, 792 aa, Zea mays subsp. mays
  peptide (1)..(792): Ceres Seq. ID no. 12375815
  misc_feature (1)..(299): NCBI GI NO: 34911062 NR Description: P0485G01.18
  misc_feature (646)..(792): NCBI GI NO: 34911062 NR Description: P0485G01.18
  misc_feature (383)..(500): NCBI GI NO: 34911062 NR Description: P0485G01.18
  misc_feature (30)..(791): NCBI GI NO: 18411001 NR Description: putative protein; protein id: At3g58640
  misc_feature (30)..(791): NCBI GI NO: 22655056 NR Description: unknown protein [Arabidopsis thaliana]
  misc_feature (519)..(593): NCBI GI NO: 34911062 NR Description: P0485G01.18
  misc_feature (293)..(791): NCBI GI NO: 11346387 NR Description: hypothetical protein F14P22
  misc_feature (1)..(590): NCBI GI NO: 11346387 NR Description: hypothetical protein F14P22
  misc_feature (479)..(791): NCBI GI NO: 30684784 NR Description: protein kinase family [Arabidopsis thaliana]
  misc_feature (479)..(765): NCBI GI NO: 25408119 NR Description: probable protein kinase
MDETPTSSGQSEDSSCEPNWWPPDLLEKIESASISRKHDVLGNLRSSSWKASQLLWSTGSYSGLIPNGFYSIIPDKKLKETFPTIPSVDDLQTLEADGLKADIIIVDTERDKKVFMLKQLSAALVKGLSSSPALVIKKIAGLVFDCFKRQNPDASPAKGSIEDTHFFGYKGPQLLGQIRHGSCRPRAILFKVLADAVGLESKLVVGLPDDGAVGFVDSYKHMSVVVSLNSMELLVDLMRFPGQLIPFSAKAIFISHISAAGESDSAENDSCDSPLEPNSPLYGLSDKVETEGIESSSNLSGRSLRNMMLRSRTFSEGKLSTSCSEPNIANAFWRHSQRRGVAEEPRGASSSPEHPLMRARGRSILGGEKQSFQEYTESGAASRSDGLGGTSTSNARRIRRRSISITPEIGDDIVRAVRAMNETLKQNRFQRDHVEGSCSYVTEDQSNANDCPNKDDASRIIGATDSDSRNRTGPTQKAMSLPSSPHEYRGQDTQKGDDFISKEKMALAWNKVFQSSPFLNKPLLPFEEWNIDFSEITIGTRVGIGFFGEVFRGIWNGTDVAIKVFLEQDLTTENMEDFCNEIYILSRLRHPNVILFLGACITPPHLSMVTEYMEMGSLYYLIHMSGQKKKLSWRRRLKIIRDICRGLMCIHRMKIVHRDLKSANCLVNKHWTVKICDFGLSRVMIDSPMTDNSSAGTPEWMAPELIRNEPFTEKCDIFSLGVIMWELCTLSRPWEGISPVQVVYAVANEGSRLEIPEGPLGRLIADCWAEPENRPSCQEILTRLLDCEYTVS

SEQ ID NO: 41169 - protein, 677 aa, Zea mays subsp. mays
  peptide (1)..(677): Ceres Seq. ID no. 12375816
  misc_feature (1)..(184): NCBI GI NO: 34911062 NR Description: P0485G01.18
  misc_feature (531)..(677): NCBI GI NO: 34911062 NR Description: P0485G01.18
  misc_feature (268)..(385): NCBI GI NO: 34911062 NR Description: P0485G01.18
  misc_feature (1)..(676): NCBI GI NO: 18411001 NR Description: putative protein; protein id: At3g58640
  misc_feature (1)..(676): NCBI GI NO: 22655056 NR Description: unknown protein [Arabidopsis thaliana]
  misc_feature (404)..(478): NCBI GI NO: 34911062 NR Description: P0485G01.18
  misc_feature (178)..(676): NCBI GI NO: 11346387 NR Description: hypothetical protein F14P22
  misc_feature (1)..(475): NCBI GI NO: 11346387 NR Description: hypothetical protein F14P22
  misc_feature (364)..(676): NCBI GI NO: 30684784 NR Description: protein kinase family [Arabidopsis thaliana]
  misc_feature (364)..(650): NCBI GI NO: 25408119 NR Description: probable protein kinase
MLKQLSAALVKGLSSSPALVIKKIAGLVFDCFKRQNPDASPAKGSIEDTHFFGYKGPQLLGQIRHGSCRPRAILFKVLADAVGLESKLVVGLPDDGAVGFVDSYKHMSVVVSLNSMELLVDLMRFPGQLIPFSAKAIFISHISAAGESDSAENDSCDSPLEPNSPLYGLSDKVETEGIESSSNLSGRSLRNMMLRSRTFSEGKLSTSCSEPNIANAFWRHSQRRGVAEEPRGASSSPEHPLMRARGRSILGGEKQSFQEYTESGAASRSDGLGGTSTSNARRIRRRSISITPEIGDDIVRAVRAMNETLKQNRFQRDHVEGSCSYVTEDQSNANDCPNKDDASRIIGATDSDSRNRTGPTQKAMSLPSSPHEYRGQDTQKGDDFISKEKMALAWNKVFQSSPFLNKPLLPFEEWNIDFSEITIGTRVGIGFFGEVFRGIWNGTDVAIKVFLEQDLTTENMEDFCNEIYILSRLRHPNVILFLGACITPPHLSMVTEYMEMGSLYYLIHMSGQKKKLSWRRRLKIIRDICRGLMCIHRMKIVHRDLKSANCLVNKHWTVKICDFGLSRVMIDSPMTDNSSAGTPEWMAPELIRNEPFTEKCDIFSLGVIMWELCTLSRPWEGISPVQVVYAVANEGSRLEIPEGPLGRLIADCWAEPENRPSCQEILTRLLDCEYTVS

SEQ ID NO: 41170 - protein, 571 aa, Zea mays subsp. mays
  peptide (1)..(571): Ceres Seq. ID no. 12375817
  misc_feature (1)..(78): NCBI GI NO: 34911062 NR Description: P0485G01.18
  misc_feature (425)..(571): NCBI GI NO: 34911062 NR Description: P0485G01.18
  misc_feature (162)..(279): NCBI GI NO: 34911062 NR Description: P0485G01.18
  misc_feature (1)..(570): NCBI GI NO: 18411001 NR Description: putative protein; protein id: At3g58640
  misc_feature (1)..(570): NCBI GI NO: 22655056 NR Description: unknown protein [Arabidopsis thaliana]
  misc_feature (298)..(372): NCBI GI NO: 34911062 NR Description: P0485G01.18
  misc_feature (72)..(570): NCBI GI NO: 11346387 NR Description: hypothetical protein F14P22
  misc_feature (1)..(369): NCBI GI NO: 11346387 NR Description: hypothetical protein F14P22
  misc_feature (258)..(570): NCBI GI NO: 30684784 NR Description: protein kinase family [Arabidopsis thaliana]
  misc_feature (258)..(544): NCBI GI NO: 25408119 NR Description: probable protein kinase
MSVVVSLNSMELLVDLMRFPGQLIPFSAKAIFISHISAAGESDSAENDSCDSPLEPNSPLYGLSDKVETEGIESSSNLSGRSLRNMMLRSRTFSEGKLSTSCSEPNIANAFWRHSQRRGVAEEPRGASSSPEHPLMRARGRSILGGEKQSFQEYTESGAASRSDGLGGTSTSNARRIRRRSISITPEIGDDIVRAVRAMNETLKQNRFQRDHVEGSCSYVTEDQSNANDCPNKDDASRIIGATDSDSRNRTGPTQKAMSLPSSPHEYRGQDTQKGDDFISKEKMALAWNKVFQSSPFLNKPLLPFEEWNIDFSEITIGTRVGIGFFGEVFRGIWNGTDVAIKVFLEQDLTTENMEDFCNEIYILSRLRHPNVILFLGACITPPHLSMVTEYMEMGSLYYLIHMSGQKKKLSWRRRLKIIRDICRGLMCIHRMKIVHRDLKSANCLVNKHWTVKICDFGLSRVMIDSPMTDNSSAGTPEWMAPELIRNEPFTEKCDIFSLGVIMWELCTLSRPWEGISPVQVVYAVANEGSRLEIPEGPLGRLIADCWAEPENRPSCQEILTRLLDCEYTVS

SEQ ID NO: 41171 - DNA, 842 bp, Zea mays subsp. mays
  misc_feature (1)..(842): Ceres Seq. ID no. 12358082
  misc_feature (647)..(647): n is a, c, t, g, unknown, or other
aacatcatcagctcgcgttgcgtgctcggcccgcctaatcctctttctttagctcaagaccggcgactaaatttggcgccagccggcagcagggggtataagtagtcgccgccgccgtcttcctcgcacctccccgctccgctctcccttgtcgagttctcagcaccggccgatccatcctcctccgcctccctcggttcggcctctggcctgcacaccatgaactctcgcttccggagcctctggagagccatggctggggcggcgagcagcggcaaggacacggtgcgcctgcggctgcacctgctcccggaccgccacgacgactgcgtgctcgtgtcggaggcgcccctgagcagcgacaagggcggggagttcttcatcgacatggacaggcaggcgccctccgccacggcggcggagcactgcgcggcgagcctgggcgccgcgtgcgccggcggcggcttcgtcatgagctgcagggtggagggggaggcgaggagcagcaggccgttcgtgcagcttgccatgcggcatgtcacgtgcatggaggacgccgccatgttcgtcgcgctcgccgcggccgtcgacctcagcgtcaaggcgtgccgcccgttccgcaggaaaccgaacaagaaggccgcctngccgtcgcccgaccacctcgagctcgacacctaggaacgcagaacaggaaggccccgccgactagcacccatggccgcccatggatccatctaactcgacctgtaaattcacttaatttcaagagctggactgaatcgtttgccacaatcaaaactctgttgtttgactggcctcagcagttagtacatgtttgg

SEQ ID NO: 41172 - protein, 153 aa, Zea mays subsp. mays
  peptide (1)..(153): Ceres Seq. ID no. 12358083
  misc_feature (9)..(140): Pfam Name: DUF1005 Pfam Description: Protein of unknown function
  misc_feature (1)..(153): NCBI GI NO: 34905328 NR Description: OJ9990_A01.12
  misc_feature (9)..(140): NCBI GI NO: 15238004 NR Description: putative protein; protein id: At5g17640.1
  misc_feature (9)..(149): NCBI GI NO: 34896878 NR Description: unknown protein
  misc_feature (9)..(149): NCBI GI NO: 36104436 NR Description: unknown protein
  misc_feature (9)..(147): NCBI GI NO: 34909364 NR Description: P0638D12.14
  misc_feature (21)..(140): NCBI GI NO: 15233530 NR Description: putative protein; protein id: At4g29310
  misc_feature (76)..(140): NCBI GI NO: 21553542 NR Description: unknown [Arabidopsis thaliana]
  misc_feature (82)..(145): NCBI GI NO: 15218372 NR Description: unknown protein; protein id: At1g10020.1
  misc_feature (73)..(145): NCBI GI NO: 15222861 NR Description: hypothetical protein; protein id: At1g50040
  misc_feature (76)..(140): NCBI GI NO: 15230917 NR Description: unknown protein; protein id: At3g19680
  misc_feature (143)..(143): Xaa is any aa, unknown or other
MNSRFRSLWRAMAGAASSGKDTVRLRLHLLPDRHDDCVLVSEAPLSSDKGGEFFIDMDRQAPSATAAEHCAASLGAACAGGGFVMSCRVEGEARSSRPFVQLAMRHVTCMEDAAMFVALAAAVDLSVKACRPFRRKPNKKAAXPSPDHLELDT

SEQ ID NO: 41173 - protein, 142 aa, Zea mays subsp. mays
  peptide (1)..(142): Ceres Seq. ID no. 12358084
  misc_feature (1)..(129): Pfam Name: DUF1005 Pfam Description: Protein of unknown function
  misc_feature (1)..(142): NCBI GI NO: 34905328 NR Description: OJ9990_A01.12
  misc_feature (1)..(129): NCBI GI NO: 15238004 NR Description: putative protein; protein id: At5g17640.1
  misc_feature (1)..(138): NCBI GI NO: 34896878 NR Description: unknown protein
  misc_feature (1)..(138): NCBI GI NO: 36104436 NR Description: unknown protein
  misc_feature (1)..(136): NCBI GI NO: 34909364 NR Description: P0638D12.14
  misc_feature (10)..(129): NCBI GI NO: 15233530 NR Description: putative protein; protein id: At4g29310
  misc_feature (65)..(129): NCBI GI NO: 21553542 NR Description: unknown [Arabidopsis thaliana]
  misc_feature (71)..(134): NCBI GI NO: 15218372 NR Description: unknown protein; protein id: At1g10020.1
  misc_feature (62)..(134): NCBI GI NO: 15222861 NR Description: hypothetical protein; protein id: At1g50040
  misc_feature (65)..(129): NCBI GI NO: 15230917 NR Description: unknown protein; protein id: At3g19680
  misc_feature (132)..(132): Xaa is any aa, unknown or other
MAGAASSGKDTVRLRLHLLPDRHDDCVLVSEAPLSSDKGGEFFIDMDRQAPSATAAEHCAASLGAACAGGGFVMSCRVEGEARSSRPFVQLAMRHVTCMEDAAMFVALAAAVDLSVKACRPFRRKPNKKAAXPSPDHLELDT

SEQ ID NO: 41174 - protein, 97 aa, Zea mays subsp. mays
  peptide (1)..(97): Ceres Seq. ID no. 12358085
  misc_feature (1)..(84): Pfam Name: DUF1005 Pfam Description: Protein of unknown function
  misc_feature (1)..(97): NCBI GI NO: 34905328 NR Description: OJ9990_A01.12
  misc_feature (1)..(84): NCBI GI NO: 15238004 NR Description: putative protein; protein id: At5g17640.1
  misc_feature (1)..(93): NCBI GI NO: 34896878 NR Description: unknown protein
  misc_feature (1)..(93): NCBI GI NO: 36104436 NR Description: unknown protein
  misc_feature (1)..(91): NCBI GI NO: 34909364 NR Description: P0638D12.14
  misc_feature (1)..(84): NCBI GI NO: 15233530 NR Description: putative protein; protein id: At4g29310
  misc_feature (20)..(84): NCBI GI NO: 21553542 NR Description: unknown [Arabidopsis thaliana]
  misc_feature (26)..(89): NCBI GI NO: 15218372 NR Description: unknown protein; protein id: At1g10020.1
  misc_feature (17)..(89): NCBI GI NO: 15222861 NR Description: hypothetical protein; protein id: At1g50040
  misc_feature (20)..(84): NCBI GI NO: 15230917 NR Description: unknown protein; protein id: At3g19680
  misc_feature (87)..(87): Xaa is any aa, unknown or other
MDRQAPSATAAEHCAASLGAACAGGGFVMSCRVEGEARSSRPFVQLAMRHVTCMEDAAMFVALAAAVDLSVKACRPFRRKPNKKAAXPSPDHLELDT

SEQ ID NO: 41175 - DNA, 679 bp, Zea mays subsp. mays
  misc_feature (1)..(679): Ceres Seq. ID no. 12418045
  misc_feature (656)..(656): n is a, c, t, g, unknown, or other
  misc_feature (641)..(641): n is a, c, t, g, unknown, or other
  misc_feature (587)..(587): n is a, c, t, g, unknown, or other
  misc_feature (534)..(534): n is a, c, t, g, unknown, or other
  misc_feature (671)..(671): n is a, c, t, g, unknown, or other
aattgcgacacttgaaaaacgtgaagaaagatacaaggcggtgtttgcagagaggatctcggtcttccggaaagcctgctgctcccttttcggttacaagatagtgatgaatgatcagcagcagtcaaatgggattcccgtaacacgctttattctgcagtcagtgtatgcccaaagcgatgatgaaaagcttgagtttgactatgaatcaggaagcactaatatcgtggtcaacgattacacatcccaacaagaaattgctcggcaggtcgacatctacataaggaggacgaactccataccagccttcactgccaacctgacaatggagtctttcaacaaaagaagtatatgctgaagacatgaaactagtgtcagggcacattgcttgatttctgtatgttatcattgacgaagagtatgtatatgagcactcacattggtgggtgaaaactgctcctgctaattaaagttgaggctggagctttgattctattcccaacggattctttttttccctttaactagcaaggngtacatgagtattactgggcatggcgacgtaatgttgaagcttccggcttgtntagagttgagtgtagctaccaggtaactaggaatacttgattcgccaatcatgnctgacgttattcctntgagagaacgagagntttgctgc

SEQ ID NO: 41176 - protein, 118 aa, Zea mays subsp. mays
  peptide (1)..(118): Ceres Seq. ID no. 12418046
  misc_feature (1)..(116): Pfam Name: Pfam Description:  Mitotic checkpoint protein
  misc_feature (1)..(118): NCBI GI NO: 34907340 NR Description: P0471B04.4
  misc_feature (2)..(117): NCBI GI NO: 15240571 NR Description: mitotic checkpoint protein-like
IATLEKREERYKAVFAERISVFRKACCSLFGYKIVMNDQQQSNGIPVTRFILQSVYAQSDDEKLEFDYESGSTNIVVNDYTSQQEIARQVDIYIRRTNSIPAFTANLTMESFNKRSIC

SEQ ID NO: 41177 - protein, 83 aa, Zea mays subsp. mays
  peptide (1)..(83): Ceres Seq. ID no. 12418047
  misc_feature (1)..(81): Pfam Name: Pfam Description:  Mitotic checkpoint protein
  misc_feature (1)..(83): NCBI GI NO: 34907340 NR Description: P0471B04.4
  misc_feature (1)..(82): NCBI GI NO: 15240571 NR Description: mitotic checkpoint protein-like
MNDQQQSNGIPVTRFILQSVYAQSDDEKLEFDYESGSTNIVVNDYTSQQEIARQVDIYIRRTNSIPAFTANLTMESFNKRSIC

SEQ ID NO: 41178 - DNA, 1123 bp, Zea mays subsp. mays
  misc_feature (1)..(1123): Ceres Seq. ID no. 12425309
aacgcccgcgcatgcgcatgcccgtgtcgttgaggattccgagaggcctcgcggcggcgtggcctgggtggagaaggagcacatgttcgagaaggtggtcaccccgagcgacgtggggaagctcaatcgcctggtcatcccaaagcagcacgcggagcgctacttccccgcgctggacgcctcgtccgccgcggcggcggcggcggcagcagccgcgggaggcgggaaggggctggtgctcagcttcgaggaccgggcggggaaggcgtggcgcttccgctactcgtactggaacagcagccagagctacgtgatgaccaaaggttggagccgcttcgtgaaggagaagccctcggtgccggggacacagtcttgttcgcgcgcggcgcgggcggcgcgcgcggccgcttcttcatcgatttccgccgccgtcgccaggatctcgcgttcctgcagccgacgctggcgtctgcgcagcgactcctgccgctgccgtcggtgcccatctgcccgtggcaggactacggcgcctcggctccggcgcccaaccggcacgtgctgttcctgcggccgcaggtgccggccgccgtagtgctcaagtcggtccccgtgcacgttgctgcatccgcggtggaggcgaccatgtcgaagcgcgtccgcctgttcggggtgaacctcgactgcccgccggacgccgaagacagcgccacagtcccccggggccgggcggcgtcgacgacgcttctgcaactgccctcgccatcgtcgtcaacatcctcctcgacggcagggaaggacgtgtgctgtttggatcttggactgtgaagacaatcaacatcctctagcaaaaagaaggagaaattgggtcgaggaactgatggggcactgacacacgaactgatatggctccagtactgcatctgcatgtgtaattgttgatgaattggtatttcttgatgatatcctgctcatataatcatattagctcatttgtgctttccgtaactaatgtgtgtttcttctcttttcttgatttgatctttgttccgaggatatgatatcgatcttctcattataaatgtacatattctgaatcatctctgactaaattcagtaattattt

SEQ ID NO: 41179 - protein, 196 aa, Zea mays subsp. mays
  peptide (1)..(196): Ceres Seq. ID no. 12425310
  misc_feature (28)..(133): Pfam Name: Pfam Description:  B3 DNA binding domain
  misc_feature (1)..(133): NCBI GI NO: 37536454 NR Description: putative DNA-binding protein
  misc_feature (2)..(133): NCBI GI NO: 34902226 NR Description: Putative RAV-like B3 domain DNA binding protein
  misc_feature (18)..(133): NCBI GI NO: 32492293 NR Description: OSJNBa0088A01.1
  misc_feature (11)..(116): NCBI GI NO: 15228649 NR Description: RAV-like protein; protein id: At3g61970
  misc_feature (11)..(116): NCBI GI NO: 26450371 NR Description: putative RAV [Arabidopsis thaliana]
  misc_feature (6)..(121): NCBI GI NO: 15239984 NR Description: putative protein; protein id: At5g06250.1
  misc_feature (23)..(116): NCBI GI NO: 21618252 NR Description: RAV-like protein [Arabidopsis thaliana]
  misc_feature (21)..(129): NCBI GI NO: 34895690 NR Description: putative DNA binding protein RAV2
  misc_feature (24)..(116): NCBI GI NO: 15223284 NR Description: DNA-binding protein, putative
  misc_feature (24)..(116): NCBI GI NO: 18407193 NR Description: putative RAV-like B3 domain DNA binding protein
TPAHAHARVVEDSERPRGGVAWVEKEHMFEKVVTPSDVGKLNRLVIPKQHAERYFPALDASSAAAAAAAAAAGGGKGLVLSFEDRAGKAWRFRYSYWNSSQSYVMTKGWSRFVKEKPSVPGTQSCSRAARAARAAASSSISAAVARISRSCSRRWRLRSDSCRCRRCPSARGRTTAPRLRRPTGTCCSCGRRCRPP

SEQ ID NO: 41180 - protein, 169 aa, Zea mays subsp. mays
  peptide (1)..(169): Ceres Seq. ID no. 12425311
  misc_feature (1)..(106): Pfam Name: Pfam Description:  B3 DNA binding domain
  misc_feature (1)..(106): NCBI GI NO: 37536454 NR Description: putative DNA-binding protein
  misc_feature (1)..(106): NCBI GI NO: 34902226 NR Description: Putative RAV-like B3 domain DNA binding protein
  misc_feature (1)..(106): NCBI GI NO: 32492293 NR Description: OSJNBa0088A01.1
  misc_feature (1)..(89): NCBI GI NO: 15228649 NR Description: RAV-like protein; protein id: At3g61970
  misc_feature (1)..(89): NCBI GI NO: 26450371 NR Description: putative RAV [Arabidopsis thaliana]
  misc_feature (1)..(94): NCBI GI NO: 15239984 NR Description: putative protein; protein id: At5g06250.1
  misc_feature (1)..(89): NCBI GI NO: 21618252 NR Description: RAV-like protein [Arabidopsis thaliana]
  misc_feature (1)..(102): NCBI GI NO: 34895690 NR Description: putative DNA binding protein RAV2
  misc_feature (1)..(89): NCBI GI NO: 15223284 NR Description: DNA-binding protein, putative
  misc_feature (1)..(89): NCBI GI NO: 18407193 NR Description: putative RAV-like B3 domain DNA binding protein
MFEKVVTPSDVGKLNRLVIPKQHAERYFPALDASSAAAAAAAAAAGGGKGLVLSFEDRAGKAWRFRYSYWNSSQSYVMTKGWSRFVKEKPSVPGTQSCSRAARAARAAASSSISAAVARISRSCSRRWRLRSDSCRCRRCPSARGRTTAPRLRRPTGTCCSCGRRCRPP

SEQ ID NO: 41181 - protein, 103 aa, Zea mays subsp. mays
  peptide (1)..(103): Ceres Seq. ID no. 12425312
RPRMRMPVSLRIPRGLAAAWPGWRRSTCSRRWSPRATWGSSIAWSSQSSTRSATSPRWTPRPPRRRRRQQPREAGRGWCSASRTGRGRRGASATRTGTAARAT

SEQ ID NO: 41182 - DNA, 439 bp, Zea mays subsp. mays
  misc_feature (1)..(439): Ceres Seq. ID no. 1923620
agtccaagatctctccctcccacggcccgctcggactccccggcgcaatggcgaccgacgcgatcctggagacgatcaagccgcggcggagcgaggagcagctcccggtgaccacggcggccgccgccggcaccaggctgcggcggcgcgtgtcctcgttctcggcgcacgtgaggccgccgccggggctgtcgtcctcggcggcagcggcgttccggcgcgcgaggtcgatgccgaccgccaaggcgctggcggcggcgggcgcgctgcggcggtggtgggagtgggtgacggcgccgttcgcgccccgcggcgacgacgacgacgaggcaaggccgctgggcggttgccgctgcgcctgcgccggcggaccgggcgggtggcgccacgtcctggtcaggctccgcgccggcgcgcgccgactgctgggccgcgacgg

SEQ ID NO: 41183 - protein, 146 aa, Zea mays subsp. mays
  peptide (1)..(146): Ceres Seq. ID no. 1923621
VQDLSLPRPARTPRRNGDRRDPGDDQAAAERGAAPGDHGGRRRHQAAAARVLVLGAREAAAGAVVLGGSGVPAREVDADRQGAGGGGRAAAVVGVGDGAVRAPRRRRRRGKAAGRLPLRLRRRTGRVAPRPGQAPRRRAPTAGPRR

SEQ ID NO: 41184 - protein, 145 aa, Zea mays subsp. mays
  peptide (1)..(145): Ceres Seq. ID no. 1923622
  misc_feature (16)..(144): NCBI GI NO: 28411879 NR Description: OSJNBa0016N23.32
SKISPSHGPLGLPGAMATDAILETIKPRRSEEQLPVTTAAAAGTRLRRRVSSFSAHVRPPPGLSSSAAAAFRRARSMPTAKALAAAGALRRWWEWVTAPFAPRGDDDDEARPLGGCRCACAGGPGGWRHVLVRLRAGARRLLGRD

SEQ ID NO: 41185 - protein, 130 aa, Zea mays subsp. mays
  peptide (1)..(130): Ceres Seq. ID no. 1923623
  misc_feature (1)..(129): NCBI GI NO: 28411879 NR Description: OSJNBa0016N23.32
MATDAILETIKPRRSEEQLPVTTAAAAGTRLRRRVSSFSAHVRPPPGLSSSAAAAFRRARSMPTAKALAAAGALRRWWEWVTAPFAPRGDDDDEARPLGGCRCACAGGPGGWRHVLVRLRAGARRLLGRD

SEQ ID NO: 41186 - DNA, 1366 bp, Zea mays subsp. mays
  misc_feature (1)..(1366): Ceres Seq. ID no. 12383517
ataaaaaaaacccgaaaaaacaccgagatccgcgcgttcctcggcgtccgcacggcccgcgcacgcactcacgcacccatccggttgccaacccatcccccgaccgacgccaccccacatacatgccgccgcccagcctcaccgccgccggcaccaccaccaccacaacccgccgccgcaacgaccgagccgcgaaggtccaccaggtactgggcgaaggcgcggggacggaggagatgggcgcggtggcggacgggtggacgcggcccgagtggtgctcggcggcgggcgtcgcgggcgtgctgcggcggcacccggcgcccgcgctcttcgggtgcggcctcctgctcttcatggccgtcgagtacaccatccccatggtcaagccggacgcgccgccgctcgacctaggcttcctcgccaccgcgggcatgcacgccgccatcgccgcgaggccctggcttaactcgctcctcgccgcgctcaacacggtcttcgtcgcgatgcaggcggcgtacatcctgtgggccatcctcgccgagcagcggccgcgcgcggccgtcgccgcgctcatgatgttcacttgccggggcgtgctgggctgcgccacccagctcccgctgccggaggagttcctgggctccgggatggacttccccgtgggcaacgtctccttcttcctcttcttctcgggccacgtcgcgggcgcggtgatcgcggcggccgacatgcggcgcgaggggcggctggcgctggcgcgcctcttcgactcgctcaacgtgctccaggtggtcaggctgctcgcgtgcaggggacactacaccattgacctggcctgttggcgttggcgcgggcatcctcttcgacacgctctccggatggtacttcgacgccaagaacggcgatagcagcaacgcaccggagaagcagtgccggagctgccagtgccacaaggccctcctttcacactagtagtactattatattttgctagctctgcaagtgccaaccatcaacgtccaactggctgacaatgggctataaattttgcactataaaatttaagtatctaatcgggttaagattaggctctatttttagtcatttttgaactataatttattaagtgccttgacattttgtgaagaaccatatggatcacaatccattaccacccctacgtctaagtgagcattgttagctaattcgtgtcatttttttaagtttcttctcttttatggaatcattttggtgtaagataatgtattcaaatgctacttacggatatgtaactgtacaaattgttcgcccggtgcgagctgtaacatttttatctgaagtttgcaagtagaggactagactaggc

SEQ ID NO: 41187 - protein, 301 aa, Zea mays subsp. mays
  peptide (1)..(301): Ceres Seq. ID no. 12383518
  misc_feature (91)..(278): NCBI GI NO: 13926235 NR Description: AT3g15820/MSJ11_22 [Arabidopsis thaliana]
  misc_feature (91)..(278): NCBI GI NO: 18400910 NR Description: expressed protein; protein id: At3g15820
  misc_feature (100)..(278): NCBI GI NO: 15232701 NR Description: unknown protein; protein id: At3g15830.1
KKNPKKHRDPRVPRRPHGPRTHSRTHPVANPSPDRRHPTYMPPPSLTAAGTTTTTTRRRNDRAAKVHQVLGEGAGTEEMGAVADGWTRPEWCSAAGVAGVLRRHPAPALFGCGLLLFMAVEYTIPMVKPDAPPLDLGFLATAGMHAAIAARPWLNSLLAALNTVFVAMQAAYILWAILAEQRPRAAVAALMMFTCRGVLGCATQLPLPEEFLGSGMDFPVGNVSFFLFFSGHVAGAVIAAADMRREGRLALARLFDSLNVLQVVRLLACRGHYTIDLACWRWRGHPLRHALRMVLRRQERR

SEQ ID NO: 41188 - protein, 261 aa, Zea mays subsp. mays
  peptide (1)..(261): Ceres Seq. ID no. 12383519
  misc_feature (51)..(238): NCBI GI NO: 13926235 NR Description: AT3g15820/MSJ11_22 [Arabidopsis thaliana]
  misc_feature (51)..(238): NCBI GI NO: 18400910 NR Description: expressed protein; protein id: At3g15820
  misc_feature (60)..(238): NCBI GI NO: 15232701 NR Description: unknown protein; protein id: At3g15830.1
MPPPSLTAAGTTTTTTRRRNDRAAKVHQVLGEGAGTEEMGAVADGWTRPEWCSAAGVAGVLRRHPAPALFGCGLLLFMAVEYTIPMVKPDAPPLDLGFLATAGMHAAIAARPWLNSLLAALNTVFVAMQAAYILWAILAEQRPRAAVAALMMFTCRGVLGCATQLPLPEEFLGSGMDFPVGNVSFFLFFSGHVAGAVIAAADMRREGRLALARLFDSLNVLQVVRLLACRGHYTIDLACWRWRGHPLRHALRMVLRRQERR

SEQ ID NO: 41189 - protein, 223 aa, Zea mays subsp. mays
  peptide (1)..(223): Ceres Seq. ID no. 12383520
  misc_feature (13)..(200): NCBI GI NO: 13926235 NR Description: AT3g15820/MSJ11_22 [Arabidopsis thaliana]
  misc_feature (13)..(200): NCBI GI NO: 18400910 NR Description: expressed protein; protein id: At3g15820
  misc_feature (22)..(200): NCBI GI NO: 15232701 NR Description: unknown protein; protein id: At3g15830.1
MGAVADGWTRPEWCSAAGVAGVLRRHPAPALFGCGLLLFMAVEYTIPMVKPDAPPLDLGFLATAGMHAAIAARPWLNSLLAALNTVFVAMQAAYILWAILAEQRPRAAVAALMMFTCRGVLGCATQLPLPEEFLGSGMDFPVGNVSFFLFFSGHVAGAVIAAADMRREGRLALARLFDSLNVLQVVRLLACRGHYTIDLACWRWRGHPLRHALRMVLRRQERR

SEQ ID NO: 41190 - DNA, 1285 bp, Zea mays subsp. mays
  misc_feature (1)..(1285): Ceres Seq. ID no. 13492017
agcaacagccatgacgacgacgaagcggcactgcttgcgcttcaccaccgtcctggcgacgacgcttctctccgccaccgccgcctgcctcgacgtcggcttctacgacaggacatgccccactgccgagaccatcgtgcagcagaccgtggcggccgcgttcaggaacaactccggcgtcgctccggcgctgatccgcatgcacttccatgactgctttgtcaggggctgcgatggctcggtgctgatcgacacggtaggcaacctgacggcggagaaggacgcgccacccaacaaccccagcctccggttcttcgacgtggtcgaccgtgccaaggcgtcactggaggctcagtgccccggcgtggtctcctgcgccgacgtgctcgccttcgcggccagggacagcgtcgtgctctccggtggcctcggctaccaggtgccgggcggacgccgtgacgggcggatatccaatgacaccgaagccctcaacaacctgcctccgccgttcttcaacgccaccgagctggcagacaggttcgcctccaagaacctcactatcgaggacctggtcgtgctctcgggcgcgcacaccatcggcgtctcgcactgcagcggcttcgccggcccgacagacctgaacggccccgttgaccggctctacaacttcagctcgcctgacgggattgacccgacgctgagcaaagcctacgcatttcttctcaagagcatctgcccggccaacaccagccagttcttcccgaacacgacggtgttcatggacctcatcacgccggaaaggtttgacaacaagtactacgtcggcctgaccaacaacctgggcctcttcaagtcagacgtggcgctgctgaccaacgcgacgatgaaggccctggtcgactccttcgtgcgcagcgaggcgactttcaggaccaagtttgccaggtccatgatcaagatggggcagatcgaggtgctgacggggacgcagggcgagatcaggcgcaactgcagggtcatcaaccccgttagtgccaccgatgatgtcgtcctcgcccgcccatcaggattcactggagtggctgcgagctagctaaccaactgtcggttcatgcacatgcattgtgcagtgtgtgatgtctagtgtgagttgatgtgtgaaattgtaataagtaatgagcagattatcttggtaagctcgcttgttactgtggcaaaagttgttttgttgcatgacaaaaatgtatactcatcggattattgaaaacaaaactgatatttgttc

SEQ ID NO: 41191 - protein, 363 aa, Zea mays subsp. mays
  peptide (1)..(363): Ceres Seq. ID no. 13492018
  misc_feature (46)..(305): Pfam Name: Pfam Description:  Peroxidase
  misc_feature (7)..(363): NCBI GI NO: 12056452 NR Description: peroxidase [Zea mays]
  misc_feature (24)..(351): NCBI GI NO: 34894766 NR Description: putative peroxidase
  misc_feature (11)..(351): NCBI GI NO: 34894752 NR Description: putative peroxidase
  misc_feature (19)..(363): NCBI GI NO: 34894748 NR Description: putative peroxidase
  misc_feature (18)..(346): NCBI GI NO: 34894760 NR Description: putative peroxidase
  misc_feature (22)..(346): NCBI GI NO: 34894758 NR Description: putative peroxidase
  misc_feature (12)..(341): NCBI GI NO: 7453849 NR Description: peroxidase prx12 precursor [Spinacia oleracea]
  misc_feature (28)..(341): NCBI GI NO: 4760700 NR Description: peroxidase 1 [Scutellaria baicalensis]
  misc_feature (32)..(363): NCBI GI NO: 12056448 NR Description: peroxidase [Zea mays]
  misc_feature (3)..(361): NCBI GI NO: 21594792 NR Description: peroxidase [Arabidopsis thaliana]
ATAMTTTKRHCLRFTTVLATTLLSATAACLDVGFYDRTCPTAETIVQQTVAAAFRNNSGVAPALIRMHFHDCFVRGCDGSVLIDTVGNLTAEKDAPPNNPSLRFFDVVDRAKASLEAQCPGVVSCADVLAFAARDSVVLSGGLGYQVPGGRRDGRISNDTEALNNLPPPFFNATELADRFASKNLTIEDLVVLSGAHTIGVSHCSGFAGPTDLNGPVDRLYNFSSPDGIDPTLSKAYAFLLKSICPANTSQFFPNTTVFMDLITPERFDNKYYVGLTNNLGLFKSDVALLTNATMKALVDSFVRSEATFRTKFARSMIKMGQIEVLTGTQGEIRRNCRVINPVSATDDVVLARPSGFTGVAAS

SEQ ID NO: 41192 - protein, 360 aa, Zea mays subsp. mays
  peptide (1)..(360): Ceres Seq. ID no. 13492019
  misc_feature (43)..(302): Pfam Name: Pfam Description:  Peroxidase
  misc_feature (4)..(360): NCBI GI NO: 12056452 NR Description: peroxidase [Zea mays]
  misc_feature (21)..(348): NCBI GI NO: 34894766 NR Description: putative peroxidase
  misc_feature (8)..(348): NCBI GI NO: 34894752 NR Description: putative peroxidase
  misc_feature (16)..(360): NCBI GI NO: 34894748 NR Description: putative peroxidase
  misc_feature (15)..(343): NCBI GI NO: 34894760 NR Description: putative peroxidase
  misc_feature (19)..(343): NCBI GI NO: 34894758 NR Description: putative peroxidase
  misc_feature (9)..(338): NCBI GI NO: 7453849 NR Description: peroxidase prx12 precursor [Spinacia oleracea]
  misc_feature (25)..(338): NCBI GI NO: 4760700 NR Description: peroxidase 1 [Scutellaria baicalensis]
  misc_feature (29)..(360): NCBI GI NO: 12056448 NR Description: peroxidase [Zea mays]
  misc_feature (1)..(358): NCBI GI NO: 21594792 NR Description: peroxidase [Arabidopsis thaliana]
MTTTKRHCLRFTTVLATTLLSATAACLDVGFYDRTCPTAETIVQQTVAAAFRNNSGVAPALIRMHFHDCFVRGCDGSVLIDTVGNLTAEKDAPPNNPSLRFFDVVDRAKASLEAQCPGVVSCADVLAFAARDSVVLSGGLGYQVPGGRRDGRISNDTEALNNLPPPFFNATELADRFASKNLTIEDLVVLSGAHTIGVSHCSGFAGPTDLNGPVDRLYNFSSPDGIDPTLSKAYAFLLKSICPANTSQFFPNTTVFMDLITPERFDNKYYVGLTNNLGLFKSDVALLTNATMKALVDSFVRSEATFRTKFARSMIKMGQIEVLTGTQGEIRRNCRVINPVSATDDVVLARPSGFTGVAAS

SEQ ID NO: 41193 - protein, 297 aa, Zea mays subsp. mays
  peptide (1)..(297): Ceres Seq. ID no. 13492020
  misc_feature (1)..(239): Pfam Name: Pfam Description:  Peroxidase
  misc_feature (1)..(297): NCBI GI NO: 12056452 NR Description: peroxidase [Zea mays]
  misc_feature (1)..(285): NCBI GI NO: 34894766 NR Description: putative peroxidase
  misc_feature (1)..(285): NCBI GI NO: 34894752 NR Description: putative peroxidase
  misc_feature (1)..(297): NCBI GI NO: 34894748 NR Description: putative peroxidase
  misc_feature (1)..(280): NCBI GI NO: 34894760 NR Description: putative peroxidase
  misc_feature (1)..(280): NCBI GI NO: 34894758 NR Description: putative peroxidase
  misc_feature (1)..(275): NCBI GI NO: 7453849 NR Description: peroxidase prx12 precursor [Spinacia oleracea]
  misc_feature (1)..(275): NCBI GI NO: 4760700 NR Description: peroxidase 1 [Scutellaria baicalensis]
  misc_feature (1)..(297): NCBI GI NO: 12056448 NR Description: peroxidase [Zea mays]
  misc_feature (1)..(295): NCBI GI NO: 21594792 NR Description: peroxidase [Arabidopsis thaliana]
MHFHDCFVRGCDGSVLIDTVGNLTAEKDAPPNNPSLRFFDVVDRAKASLEAQCPGVVSCADVLAFAARDSVVLSGGLGYQVPGGRRDGRISNDTEALNNLPPPFFNATELADRFASKNLTIEDLVVLSGAHTIGVSHCSGFAGPTDLNGPVDRLYNFSSPDGIDPTLSKAYAFLLKSICPANTSQFFPNTTVFMDLITPERFDNKYYVGLTNNLGLFKSDVALLTNATMKALVDSFVRSEATFRTKFARSMIKMGQIEVLTGTQGEIRRNCRVINPVSATDDVVLARPSGFTGVAAS

SEQ ID NO: 41194 - DNA, 2024 bp, Zea mays subsp. mays
  misc_feature (1)..(2024): Ceres Seq. ID no. 12375886
gcacgagaccattacctagaacatcctaatcgaaaaaactacaactgttggagtaggcccgggttggccacggccgccacactgctccgctctgctctgctctctgaaggcattgcctgcccggttccttcccccgccggcgtcgtcggtccgcgagttgttggcatggccgccgcagggacgcagctaggccggcttctgggcggcctctggttcctggccgcgttgctaggacgaccgggcgctacggcggcggcaccagctgtggccgccgtcgacgggcggcgcgccgtcgcggcgaccggggaggacttcgtgtgcgcgacgttggactggtggccgccggacaagtgcgactacggcacctgcgcctggggccgcgccggcctgctcaacctggatctctccaacaaggtcctgctcaatgccgtcagagccttctcgccgccgctgctgctccgcctgggagggtcgctgcaggacaaggtggtgtacgggtacggcgccggtcggccgtgcgcgccgttcgtcaggaacgcgtcggagatgcacggcttctcgcagggctgcctgcccctgcgcaggtgggacgacctcaacgccttcttccggagatccggtgccaaggtcgtgttcgggctcaacgcgctgaacggccgcgtcccgttgccggacgggtccatgggagggccgtgggactacaccaacgcggcgtcgctgatccggtacaccgcgaacaagggctaccgaatccatggatgggagcttgggaacgaactgagcggcactggagtgggagctcgggttggcgcggaccagtacgccgcagacgtgatcgccctgaaagcgctagtcgacgacgtgtaccggagcgagccatcgaagccgctggtgcttgctcccggaggattcttcgaccaagcctggttcactgagcttgtcgtcaagaccgggccggatctactgagcgtggtcacgcaccacgtctacaatctaggaccaggaagggacacgcatctgatcgacaagatcctcgacccgtcaaccctcgacgggatggtcagcacgttcagcgacctccagcggctgctcaagtccacggggacgtcggctgtcgcgtgggtcggggaagccggaggcgcctacaacagcggccgccacctcgtcacggacgcgttcgtgttcagcttctggtttttagatcagcttgggatggcagcgaggttcgacaccaagagctactgcaggcagagtttggtcggcggcaactacggcctgctaaacaccacgacgttccagcctaaccctgattattacagtgctctactgtggcatcgcctcatggggaccgaagttctagcagtaacattcagcggcacgaacaagatccgcgcgtacgcgcactgcgcgagagattcaccaggaatcactctgctgctgatcaacctgagcggcaacgccaccgcgcgggtctcggtgacggcccaaggggctgccgcggcgcacgcgcacaggcacggcgcgaggaagcacggcggcggcaggaagttccggcacgtgcacgtccccggcttcgccggcgccggcgaggcggcagcgggcgccgtgcgacacgagtaccacctcacccccaaggacggcgacctgacgagccaggtcgtgatgctgaacggcagggcgttggccaccgacgcggcggggaacatccccgccctggaggcggtcgaggtggacgcggcgcggcccatcgccgtcacgccctactccatcgtgttcgctcgcgttccgcatttcagtgccccggcgtgtagggtagaccggtagagtagcggtttagatgggtagattcataatgggtttggcgtgattggtgatgatggacagctaagctttccatctggtgagatgaggtgaagtgaggtgcaaggcatctgtcgaaagaaaagggatgcaatgcaatgggggtgagtttgttttctttttacgattggaattgtaaaaggtcgaagaaatttatgatgatc

SEQ ID NO: 41195 - protein, 607 aa, Zea mays subsp. mays
  peptide (1)..(607): Ceres Seq. ID no. 12375887
  misc_feature (85)..(150): Pfam Name: Pfam Description:  Glycosyl hydrolase family 79, N-terminal domain
  misc_feature (134)..(520): NCBI GI NO: 24413987 NR Description: contains ESTs AU097236
  misc_feature (492)..(603): NCBI GI NO: 24413987 NR Description: contains ESTs AU097236
  misc_feature (62)..(150): NCBI GI NO: 24413987 NR Description: contains ESTs AU097236
  misc_feature (92)..(603): NCBI GI NO: 30692670 NR Description: expressed protein [Arabidopsis thaliana]
  misc_feature (92)..(603): NCBI GI NO: 10177640 NR Description: contains similarity to heparanase~gene_id:MGG23.2
  misc_feature (72)..(603): NCBI GI NO: 22327999 NR Description: glycosyl hydrolase family 79
  misc_feature (92)..(603): NCBI GI NO: 9757846 NR Description: contains similarity to heparanase~gene_id:MFB13.2
  misc_feature (92)..(603): NCBI GI NO: 38174813 NR Description: putative heparanase
  misc_feature (72)..(603): NCBI GI NO: 10176717 NR Description: contains similarity to heparanase~gene_id:MXM12.7
  misc_feature (66)..(510): NCBI GI NO: 34393590 NR Description: putative beta-glucuronidase precursor
ARDHYLEHPNRKNYNCWSRPGLATAATLLRSALLSEGIACPVPSPAGVVGPRVVGMAAAGTQLGRLLGGLWFLAALLGRPGATAAAPAVAAVDGRRAVAATGEDFVCATLDWWPPDKCDYGTCAWGRAGLLNLDLSNKVLLNAVRAFSPPLLLRLGGSLQDKVVYGYGAGRPCAPFVRNASEMHGFSQGCLPLRRWDDLNAFFRRSGAKVVFGLNALNGRVPLPDGSMGGPWDYTNAASLIRYTANKGYRIHGWELGNELSGTGVGARVGADQYAADVIALKALVDDVYRSEPSKPLVLAPGGFFDQAWFTELVVKTGPDLLSVVTHHVYNLGPGRDTHLIDKILDPSTLDGMVSTFSDLQRLLKSTGTSAVAWVGEAGGAYNSGRHLVTDAFVFSFWFLDQLGMAARFDTKSYCRQSLVGGNYGLLNTTTFQPNPDYYSALLWHRLMGTEVLAVTFSGTNKIRAYAHCARDSPGITLLLINLSGNATARVSVTAQGAAAAHAHRHGARKHGGGRKFRHVHVPGFAGAGEAAAGAVRHEYHLTPKDGDLTSQVVMLNGRALATDAAGNIPALEAVEVDAARPIAVTPYSIVFARVPHFSAPACRVDR

SEQ ID NO: 41196 - protein, 552 aa, Zea mays subsp. mays
  peptide (1)..(552): Ceres Seq. ID no. 12375888
  misc_feature (30)..(95): Pfam Name: Pfam Description:  Glycosyl hydrolase family 79, N-terminal domain
  misc_feature (79)..(465): NCBI GI NO: 24413987 NR Description: contains ESTs AU097236
  misc_feature (437)..(548): NCBI GI NO: 24413987 NR Description: contains ESTs AU097236
  misc_feature (7)..(95): NCBI GI NO: 24413987 NR Description: contains ESTs AU097236
  misc_feature (37)..(548): NCBI GI NO: 30692670 NR Description: expressed protein [Arabidopsis thaliana]
  misc_feature (37)..(548): NCBI GI NO: 10177640 NR Description: contains similarity to heparanase~gene_id:MGG23.2
  misc_feature (17)..(548): NCBI GI NO: 22327999 NR Description: glycosyl hydrolase family 79
  misc_feature (37)..(548): NCBI GI NO: 9757846 NR Description: contains similarity to heparanase~gene_id:MFB13.2
  misc_feature (37)..(548): NCBI GI NO: 38174813 NR Description: putative heparanase
  misc_feature (17)..(548): NCBI GI NO: 10176717 NR Description: contains similarity to heparanase~gene_id:MXM12.7
  misc_feature (11)..(455): NCBI GI NO: 34393590 NR Description: putative beta-glucuronidase precursor
MAAAGTQLGRLLGGLWFLAALLGRPGATAAAPAVAAVDGRRAVAATGEDFVCATLDWWPPDKCDYGTCAWGRAGLLNLDLSNKVLLNAVRAFSPPLLLRLGGSLQDKVVYGYGAGRPCAPFVRNASEMHGFSQGCLPLRRWDDLNAFFRRSGAKVVFGLNALNGRVPLPDGSMGGPWDYTNAASLIRYTANKGYRIHGWELGNELSGTGVGARVGADQYAADVIALKALVDDVYRSEPSKPLVLAPGGFFDQAWFTELVVKTGPDLLSVVTHHVYNLGPGRDTHLIDKILDPSTLDGMVSTFSDLQRLLKSTGTSAVAWVGEAGGAYNSGRHLVTDAFVFSFWFLDQLGMAARFDTKSYCRQSLVGGNYGLLNTTTFQPNPDYYSALLWHRLMGTEVLAVTFSGTNKIRAYAHCARDSPGITLLLINLSGNATARVSVTAQGAAAAHAHRHGARKHGGGRKFRHVHVPGFAGAGEAAAGAVRHEYHLTPKDGDLTSQVVMLNGRALATDAAGNIPALEAVEVDAARPIAVTPYSIVFARVPHFSAPACRVDR

SEQ ID NO: 41197 - protein, 425 aa, Zea mays subsp. mays
  peptide (1)..(425): Ceres Seq. ID no. 12375889
  misc_feature (1)..(222): Pfam Name: Pfam Description:  Glycosyl hydrolase family 79, N-terminal domain
  misc_feature (1)..(338): NCBI GI NO: 24413987 NR Description: contains ESTs AU097236
  misc_feature (310)..(421): NCBI GI NO: 24413987 NR Description: contains ESTs AU097236
  misc_feature (1)..(421): NCBI GI NO: 30692670 NR Description: expressed protein [Arabidopsis thaliana]
  misc_feature (1)..(421): NCBI GI NO: 10177640 NR Description: contains similarity to heparanase~gene_id:MGG23.2
  misc_feature (1)..(421): NCBI GI NO: 22327999 NR Description: glycosyl hydrolase family 79
  misc_feature (1)..(421): NCBI GI NO: 9757846 NR Description: contains similarity to heparanase~gene_id:MFB13.2
  misc_feature (1)..(421): NCBI GI NO: 38174813 NR Description: putative heparanase
  misc_feature (1)..(421): NCBI GI NO: 10176717 NR Description: contains similarity to heparanase~gene_id:MXM12.7
  misc_feature (1)..(328): NCBI GI NO: 34393590 NR Description: putative beta-glucuronidase precursor
  misc_feature (338)..(421): NCBI GI NO: 34393590 NR Description: putative beta-glucuronidase precursor
MHGFSQGCLPLRRWDDLNAFFRRSGAKVVFGLNALNGRVPLPDGSMGGPWDYTNAASLIRYTANKGYRIHGWELGNELSGTGVGARVGADQYAADVIALKALVDDVYRSEPSKPLVLAPGGFFDQAWFTELVVKTGPDLLSVVTHHVYNLGPGRDTHLIDKILDPSTLDGMVSTFSDLQRLLKSTGTSAVAWVGEAGGAYNSGRHLVTDAFVFSFWFLDQLGMAARFDTKSYCRQSLVGGNYGLLNTTTFQPNPDYYSALLWHRLMGTEVLAVTFSGTNKIRAYAHCARDSPGITLLLINLSGNATARVSVTAQGAAAAHAHRHGARKHGGGRKFRHVHVPGFAGAGEAAAGAVRHEYHLTPKDGDLTSQVVMLNGRALATDAAGNIPALEAVEVDAARPIAVTPYSIVFARVPHFSAPACRVDR

SEQ ID NO: 41198 - DNA, 1392 bp, Zea mays subsp. mays
  misc_feature (1)..(1392): Ceres Seq. ID no. 12380100
gcacgagaccattacctagaacatcctaatcgaaaagacgcaccgcacaccctagcataggaggcaaagaagtacagagggaggaggcgggcagcagatacgcggcgtgacagacacccagggccaggaagggtgctgtttatccatgctgctccggctgaagatcgtcgtcggcgtccactcggtggtgctcccggttcctgttccaggcggctatggccatggcgcctgctacgcggcagtagagccctgctggcgccgcagccggaggccagctctagcggcggcgggtggcctcgtcgcgaggcggccgaggcagagcgccacggtggtgatggcgctgaaggaggagccggagggcagcagccgccgcggcttcgccggcggcggtccgagctgggaccccgggctggagatccaagtccccttcgagcaaagaccggtgaacgagtactcctgctctcaagtatagcgccctctactcgtgggcggagctgagcccagggtccttcttcctccgcctcggcggcctgtgcctcgtgaccttcactgtgctcgcggctccaattgccgccgcaagcttcaatccaggaaaggatccactcaagttcgtgctagcagctgggatcgggacgctgcttctggtgtcactggcggttctcaggatatacctggggtggagctacgttggtgatcgcctgctgtcagcggtggtaccgtacgaagaaaccggatggtacgacggccagatgtgggtgaagccaccagaggtgttggcccgtgacaggctcctgggatcttacaaggtgaagccggtggtcaacctgctgaagcagacgctggtgggcaccggcgcggctgctcgtgggcgccgtgtcgctcttcgcgttcgccgcgccggtcgaggacttcctccacgccctgagccagcctccctcctccgccaccgcctcgtccaagccgagcttgaggaaggaggagctgctgcggctaccagtcgaggtgatgcaggacgacgacctcgctgcggccgcggccgaggccgccgacggccggcccgtctactgcagggaccgctactaccgggccctcgccggcggtcagtactgcaggtgggacgacctgctcaactgataaatacctagagcagtattgctgtggtacgacgcggcaggacaggacgtattttttttgtcagatgggaaatttcggactgaactgctagaaattgagttcttaatggcacacaagcataaggaacagcaagaaaaagcaacacagaatcagagaaaaaacaagagtttatatattcacttttctctctttgtttctggagttacatctggtctttccgtttcttgagttacctctgatctttttgtttcttgagtt

SEQ ID NO: 41199 - protein, 131 aa, Zea mays subsp. mays
  peptide (1)..(131): Ceres Seq. ID no. 12380101
  misc_feature (1)..(36): NCBI GI NO: 15240715 NR Description: putative protein; protein id: At5g67370
  misc_feature (1)..(93): NCBI GI NO: 40736997 NR Description: expressed protein
  misc_feature (1)..(31): NCBI GI NO: 37520418 NR Description: hypothetical protein [Gloeobacter violaceus]
  misc_feature (1)..(36): NCBI GI NO: 16331827 NR Description: hypothetical protein [Synechocystis sp. PCC 6803]
  misc_feature (1)..(31): NCBI GI NO: 11465739 NR Description: ORF36 [Porphyra purpurea]
  misc_feature (1)..(35): NCBI GI NO: 3184557 NR Description: unknown [Synechococcus sp. PCC 7002]
  misc_feature (1)..(33): NCBI GI NO: 17231662 NR Description: hypothetical protein [Nostoc sp. PCC 7120]
  misc_feature (1)..(30): NCBI GI NO: 23040962 NR Description: hypothetical protein
  misc_feature (1)..(33): NCBI GI NO: 23123845 NR Description: hypothetical protein [Nostoc punctiforme]
  misc_feature (1)..(35): NCBI GI NO: 15239796 NR Description: putative protein; protein id: At5g11840.1
MWVKPPEVLARDRLLGSYKVKPVVNLLKQTLVGTGAAARGRRVALRVRRAGRGLPPRPEPASLLRHRLVQAELEEGGAAAATSRGDAGRRPRCGRGRGRRRPARLLQGPLLPGPRRRSVLQVGRPAQLINT

SEQ ID NO: 41200 - protein, 108 aa, Zea mays subsp. mays
  peptide (1)..(108): Ceres Seq. ID no. 12380102
  misc_feature (57)..(104): NCBI GI NO: 15240715 NR Description: putative protein; protein id: At5g67370
  misc_feature (64)..(104): NCBI GI NO: 40736997 NR Description: expressed protein
MLLRLKIVVGVHSVVLPVPVPGGYGHGACYAAVEPCWRRSRRPALAAAGGLVARRPRQSATVVMALKEEPEGSSRRGFAGGGPSWDPGLEIQVPFEQRPVNEYSCSQV

SEQ ID NO: 41201 - DNA, 1054 bp, Zea mays subsp. mays
  misc_feature (1)..(1054): Ceres Seq. ID no. 12419744
  misc_feature (798)..(798): n is a, c, t, g, unknown, or other
  misc_feature (791)..(791): n is a, c, t, g, unknown, or other
aaaaaagatgtcgaactccacgatcgatcactgatcgacatcgctgtccgctgcccggcttcctttctctccccatatccatatcagatcctgcggcgaattccttccaactccaggatcgagagcacacgcagatggcgaggcacccgcgcgcgccgctgctccggcgtctgctcctcctggcggccctcgcggcctcctgctcctactacctcctcttcctgcaggcgcaggcctccgtcccgccgcggtacgacgggttcgcctacggcggcggcgccgcgacggcctggaaggacgccgtcctcgtcgaggcctttctcgacccgctctgccccgacagccgcgacgcctggcagccgctgaagctcgccgtcgagcgatacgcgccgcgggtctcactcatcgtccacccgttcccactaccataccacacatatgcattctatgcctgccgcgcgctttacatagctaacaagttgaattcatcatcgacatatccattgctggagctgttcttcaagaaccaggaaaagttctacaattctgccacatcatctctctcgggcccttccgtagctctaggaatgtcgaagatggctgcgcagactgttggtaactcagtatccgagtttctgtcgggcttcagcgatgggaagacagactcggcagcgagagtttcattcaagtacgggtgcacgaggggagtctttggcgcgccgttcttctttgtgaatggcttcctccagcctgggggcggatcgcctatcgactacagcacgtggatcggnatcctanacccccttgtttcccagaacggtgaacggatcgagatgtttacttcgatgtaagtgattgaagtggccttgctacagaggatacggtcgtacagatgtttcgctagtgccgacggcggacaagcaaacagctattatgcaattgcaaactgtgtgtaagctctgcagtggtaaatagcatcccactttgctcgttgtactgttaagctagcagttgtgtgctagctagtatatcggggtaagtatgtgaagaagct

SEQ ID NO: 41202 - protein, 282 aa, Zea mays subsp. mays
  peptide (1)..(282): Ceres Seq. ID no. 12419745
  misc_feature (58)..(271): NCBI GI NO: 38346025 NR Description: OSJNBb0071D01.2
  misc_feature (57)..(269): NCBI GI NO: 22329686 NR Description: unknown protein; protein id: At1g20225
  misc_feature (74)..(268): NCBI GI NO: 25518088 NR Description: T20H2.2 protein - Arabidopsis thaliana
  misc_feature (74)..(269): NCBI GI NO: 15222928 NR Description: unknown protein; protein id: At1g76020.1
  misc_feature (74)..(254): NCBI GI NO: 8778813 NR Description: T4O12.23 [Arabidopsis thaliana]
  misc_feature (263)..(263): Xaa is any aa, unknown or other
  misc_feature (266)..(266): Xaa is any aa, unknown or other
KRCRTPRSITDRHRCPLPGFLSLPISISDPAANSFQLQDREHTQMARHPRAPLLRRLLLLAALAASCSYYLLFLQAQASVPPRYDGFAYGGGAATAWKDAVLVEAFLDPLCPDSRDAWQPLKLAVERYAPRVSLIVHPFPLPYHTYAFYACRALYIANKLNSSSTYPLLELFFKNQEKFYNSATSSLSGPSVALGMSKMAAQTVGNSVSEFLSGFSDGKTDSAARVSFKYGCTRGVFGAPFFFVNGFLQPGGGSPIDYSTWIXILXPLVSQNGERIEMFTSM

SEQ ID NO: 41203 - protein, 238 aa, Zea mays subsp. mays
  peptide (1)..(238): Ceres Seq. ID no. 12419746
  misc_feature (14)..(227): NCBI GI NO: 38346025 NR Description: OSJNBb0071D01.2
  misc_feature (13)..(225): NCBI GI NO: 22329686 NR Description: unknown protein; protein id: At1g20225
  misc_feature (30)..(224): NCBI GI NO: 25518088 NR Description: T20H2.2 protein - Arabidopsis thaliana
  misc_feature (30)..(225): NCBI GI NO: 15222928 NR Description: unknown protein; protein id: At1g76020.1
  misc_feature (30)..(210): NCBI GI NO: 8778813 NR Description: T4O12.23 [Arabidopsis thaliana]
  misc_feature (219)..(219): Xaa is any aa, unknown or other
  misc_feature (222)..(222): Xaa is any aa, unknown or other
MARHPRAPLLRRLLLLAALAASCSYYLLFLQAQASVPPRYDGFAYGGGAATAWKDAVLVEAFLDPLCPDSRDAWQPLKLAVERYAPRVSLIVHPFPLPYHTYAFYACRALYIANKLNSSSTYPLLELFFKNQEKFYNSATSSLSGPSVALGMSKMAAQTVGNSVSEFLSGFSDGKTDSAARVSFKYGCTRGVFGAPFFFVNGFLQPGGGSPIDYSTWIXILXPLVSQNGERIEMFTSM

SEQ ID NO: 41204 - DNA, 466 bp, Zea mays subsp. mays
  misc_feature (1)..(466): Ceres Seq. ID no. 1959522
tcagaacattgaagagtttacatggttaaactcaagctacagtccagtgctgaagcagttggaaacgcggtttatgattgattactacttcagaactgggcatgctaggcacgatgaaaatcccaagtttcggaaccccaagtacttgtcaattctcaaccatctgaggttctatctccctgagatcttcccaagacttaacaaggtgttatttctggatgatgatactgtagtgcagcgagacctaagtgcgctttggttggtagatctcaaaggcaaggttaatggtgctgtcgagacctgtagacaggacttccataggtttgataagtacctcaacttctcaaaccctcttattgccaagaattttgatccacatgcttgtggttgggcatatggcatgaacatgtttgatttgtccgactggagaaagcaaaacatcactgaggtctaccatacctggcag

SEQ ID NO: 41205 - protein, 155 aa, Zea mays subsp. mays
  peptide (1)..(155): Ceres Seq. ID no. 1959523
  misc_feature (1)..(154): NCBI GI NO: 10177914 NR Description: emb|CAB71043
  misc_feature (1)..(154): NCBI GI NO: 18422837 NR Description: putative protein; protein id: At5g47780
  misc_feature (1)..(154): NCBI GI NO: 38423965 NR Description: putative glycosyltransferase
  misc_feature (1)..(154): NCBI GI NO: 7271113 NR Description: 68 kDa protein [Cicer arietinum]
  misc_feature (1)..(154): NCBI GI NO: 14517362 NR Description: AT3g61130/T20K12_30 [Arabidopsis thaliana]
  misc_feature (1)..(154): NCBI GI NO: 15233046 NR Description: putative protein; protein id: At3g61130
  misc_feature (1)..(154): NCBI GI NO: 7485958 NR Description: hypothetical protein F22I13
  misc_feature (1)..(154): NCBI GI NO: 30691875 NR Description: glycosyltransferase family 8
  misc_feature (1)..(154): NCBI GI NO: 37533460 NR Description: hypothetical protein
  misc_feature (1)..(154): NCBI GI NO: 18399484 NR Description: Expressed protein; protein id: At2g20810
QNIEEFTWLNSSYSPVLKQLETRFMIDYYFRTGHARHDENPKFRNPKYLSILNHLRFYLPEIFPRLNKVLFLDDDTVVQRDLSALWLVDLKGKVNGAVETCRQDFHRFDKYLNFSNPLIAKNFDPHACGWAYGMNMFDLSDWRKQNITEVYHTWQ

SEQ ID NO: 41206 - protein, 131 aa, Zea mays subsp. mays
  peptide (1)..(131): Ceres Seq. ID no. 1959524
  misc_feature (1)..(130): NCBI GI NO: 10177914 NR Description: emb|CAB71043
  misc_feature (1)..(130): NCBI GI NO: 18422837 NR Description: putative protein; protein id: At5g47780
  misc_feature (1)..(130): NCBI GI NO: 38423965 NR Description: putative glycosyltransferase
  misc_feature (1)..(130): NCBI GI NO: 7271113 NR Description: 68 kDa protein [Cicer arietinum]
  misc_feature (1)..(130): NCBI GI NO: 14517362 NR Description: AT3g61130/T20K12_30 [Arabidopsis thaliana]
  misc_feature (1)..(130): NCBI GI NO: 15233046 NR Description: putative protein; protein id: At3g61130
  misc_feature (1)..(130): NCBI GI NO: 7485958 NR Description: hypothetical protein F22I13
  misc_feature (1)..(130): NCBI GI NO: 30691875 NR Description: glycosyltransferase family 8
  misc_feature (1)..(130): NCBI GI NO: 37533460 NR Description: hypothetical protein
  misc_feature (1)..(130): NCBI GI NO: 18399484 NR Description: Expressed protein; protein id: At2g20810
MIDYYFRTGHARHDENPKFRNPKYLSILNHLRFYLPEIFPRLNKVLFLDDDTVVQRDLSALWLVDLKGKVNGAVETCRQDFHRFDKYLNFSNPLIAKNFDPHACGWAYGMNMFDLSDWRKQNITEVYHTWQ

SEQ ID NO: 41207 - DNA, 1875 bp, Zea mays subsp. mays; identical to SEQ ID NO: 24566
  misc_feature (1)..(1875): Ceres Seq. ID no. 12364204

SEQ ID NO: 41208 - protein, 516 aa, Zea mays subsp. mays; identical to SEQ ID NO: 24567
  peptide (1)..(516): Ceres Seq. ID no. 12364205
  misc_feature (342)..(371): Pfam Name: Pfam Description:  Zn-finger in Ran binding protein and others
  misc_feature (14)..(467): NCBI GI NO: 13702809 NR Description: putative ARP protein [Oryza sativa]
  misc_feature (124)..(280): NCBI GI NO: 15221905 NR Description: hypothetical protein; protein id: At1g48570
  misc_feature (295)..(411): NCBI GI NO: 15221905 NR Description: hypothetical protein; protein id: At1g48570
  misc_feature (42)..(86): NCBI GI NO: 15221905 NR Description: hypothetical protein; protein id: At1g48570
  misc_feature (140)..(433): NCBI GI NO: 21593408 NR Description: unknown [Arabidopsis thaliana]
  misc_feature (66)..(98): NCBI GI NO: 21593408 NR Description: unknown [Arabidopsis thaliana]
  misc_feature (140)..(417): NCBI GI NO: 18409643 NR Description: expressed protein; protein id: At1g70650
  misc_feature (66)..(98): NCBI GI NO: 18409643 NR Description: expressed protein; protein id: At1g70650
  misc_feature (278)..(402): NCBI GI NO: 15221905 NR Description: hypothetical protein; protein id: At1g48570
  misc_feature (140)..(414): NCBI GI NO: 13324787 NR Description: hypothetical protein [Oryza sativa]

SEQ ID NO: 41209 - protein, 344 aa, Zea mays subsp. mays; identical to SEQ ID NO: 24568
  peptide (1)..(344): Ceres Seq. ID no. 12364206
  misc_feature (170)..(199): Pfam Name: Pfam Description:  Zn-finger in Ran binding protein and others
  misc_feature (1)..(295): NCBI GI NO: 13702809 NR Description: putative ARP protein [Oryza sativa]
  misc_feature (1)..(108): NCBI GI NO: 15221905 NR Description: hypothetical protein; protein id: At1g48570
  misc_feature (123)..(239): NCBI GI NO: 15221905 NR Description: hypothetical protein; protein id: At1g48570
  misc_feature (1)..(261): NCBI GI NO: 21593408 NR Description: unknown [Arabidopsis thaliana]
  misc_feature (1)..(245): NCBI GI NO: 18409643 NR Description: expressed protein; protein id: At1g70650
  misc_feature (106)..(230): NCBI GI NO: 15221905 NR Description: hypothetical protein; protein id: At1g48570
  misc_feature (1)..(242): NCBI GI NO: 13324787 NR Description: hypothetical protein [Oryza sativa]
  misc_feature (1)..(298): NCBI GI NO: 34393925 NR Description: unknown protein
  misc_feature (155)..(344): NCBI GI NO: 13702809 NR Description: putative ARP protein [Oryza sativa]
  misc_feature (1)..(199): NCBI GI NO: 25372841 NR Description: hypothetical protein F5A18.17

SEQ ID NO: 41210 - protein, 279 aa, Zea mays subsp. mays; identical to SEQ ID NO: 24569
  peptide (1)..(279): Ceres Seq. ID no. 12364207
  misc_feature (105)..(134): Pfam Name: Pfam Description:  Zn-finger in Ran binding protein and others
  misc_feature (1)..(230): NCBI GI NO: 13702809 NR Description: putative ARP protein [Oryza sativa]
  misc_feature (1)..(43): NCBI GI NO: 15221905 NR Description: hypothetical protein; protein id: At1g48570
  misc_feature (58)..(174): NCBI GI NO: 15221905 NR Description: hypothetical protein; protein id: At1g48570
  misc_feature (1)..(196): NCBI GI NO: 21593408 NR Description: unknown [Arabidopsis thaliana]
  misc_feature (1)..(180): NCBI GI NO: 18409643 NR Description: expressed protein; protein id: At1g70650
  misc_feature (41)..(165): NCBI GI NO: 15221905 NR Description: hypothetical protein; protein id: At1g48570
  misc_feature (1)..(177): NCBI GI NO: 13324787 NR Description: hypothetical protein [Oryza sativa]
  misc_feature (1)..(233): NCBI GI NO: 34393925 NR Description: unknown protein
  misc_feature (90)..(279): NCBI GI NO: 13702809 NR Description: putative ARP protein [Oryza sativa]
  misc_feature (1)..(134): NCBI GI NO: 25372841 NR Description: hypothetical protein F5A18.17

SEQ ID NO: 41211 - DNA, 2064 bp, Zea mays subsp. mays
  misc_feature (1)..(2064): Ceres Seq. ID no. 12364043
gcacgagaccattacctagaacatcctaatcgaaaaatagtggtctatgtcaaatcttctagcgctcgcaattcttctcctctccaccacgccggcgccgacggccggtgaacagaccatctgcagcgatgccacgtacgagcgaaacagcacatacaagtccagtctgaggtcggtagccggcgcactgaccggggacgccgcgaggctgcactcgtccaccggcgctgcaggggagggccccgacaaggtctacggcgccgtgctctgccgggcggacacagcgggtgctgactgcgccaggcgcctccgggacgcccttgccgccatcaccgacggggacggccgctcgcgttgcgcgctccacagggacgtggccgtctactccgagctgtaccagctccgtttctccgacagggacttcctcgccgacttcagcaacgcgccggaatgggtcgacgtcacgaacccaggccccgtgccgctcgccgtggccgcgcggttcgaccagcgggtcacggagctgctgagcgcgctcgctgacgcggcggcggggcgaccgggcaggtgggccgtcggcgaagcgccgtggtcgtcgtcggggggcagggaccgggcggtgtacgcgctggcgcagtgcacgctggacatgccgccggaccactgccgggcctgcctcgatggcgccatggcagagcggcgacggaaggtcggcggcggcaagatgggcgcggcagtcttcggggcgcggtgcaccctgcggtatgagatggatctgcagttcttcaacgtcactggcaacagcaagatgctgtccctgcttgggaagaagaaagaccgtgcgttcgtcatcgttgcaacagcttacgcttcggcaatcctctgtacacgcttgcttttctggctgctaagcgtctggaggaaacaaaaaaggaaaatggacttgacggaggagccccagaatgtggatgaaatactcaggtcatggagaattgaagatgctagtttagagttctcgctgtatgatttctctcagattgctgatgccacagtcaacttctcacccaaaaatatgataggggagggcggatttggcccagtttacaagggagtacttactgatggacaagaggtagcgataaaaagactgtctgctcggtcacgacaaggtctagtagagttcaagaatgagatccaggttatagcaaagcttcagcacagaaacctcgtcaggctccttggctgttgcatccatgaagaagagaagatgctggtctacgaatacctgacgaacaaaagcttggaccacttcatttttgatccaatcagacaggcatcgcttgattggaagagacggattaaaatagttgatggtatagcccagggactcctgtacctccacaatctctcgagaatacgcatcatccacagggacttgaaagcaggtaacatcctgttagattctgacctaaacccgaaaatctctgatttcgggatggcgaggatatttccatcggatgccactcaagcaacagccagcagactcgtgggcacatatggatacatggctcctgaatatgtgtctgatggccttctctcgatcaagtcagatgttttcagtttcggggtcctgcttcttgagattataagtggaaagaggagctcaggttttcagcacaatggagagttctacaaccttcttgaatacgcctgggaactgtggaaggatagaagatggaatgagttcattgatcaatcctttggtgatgactacgaactggaagagctgatgaaataccttgctgtggcattgctgtgtgttcaagaaaaaacagtagatcgtcccacaatgcctgatgttgttgcagttcttagcagcgatggcgtcactttgccagaaccaaagcagccagcttactcctatgcgaaagtagatgtgtcagtaaatgtcgctgtgttgagtagcagaaatgatgttaccatcactactacaaatggcagataatagaatgtaatactgttaataaagtgtgcgctacaggtcttggtcatcctccttgtgtt

SEQ ID NO: 41212 - protein, 652 aa, Zea mays subsp. mays
  peptide (1)..(652): Ceres Seq. ID no. 12364044
  misc_feature (297)..(650): NCBI GI NO: 34898768 NR Description: OJ1131_E05.8
  misc_feature (4)..(244): NCBI GI NO: 34898768 NR Description: OJ1131_E05.8
  misc_feature (24)..(640): NCBI GI NO: 33146474 NR Description: putative receptor-like protein kinase 4
  misc_feature (24)..(640): NCBI GI NO: 34898778 NR Description: OJ1131_E05.14
  misc_feature (307)..(647): NCBI GI NO: 34898776 NR Description: OJ1131_E05.12
  misc_feature (4)..(247): NCBI GI NO: 34898776 NR Description: OJ1131_E05.12
  misc_feature (297)..(652): NCBI GI NO: 33146472 NR Description: putative receptor-like protein kinase 4
  misc_feature (4)..(624): NCBI GI NO: 34899292 NR Description: receptor protein kinase-like protein
  misc_feature (192)..(652): NCBI GI NO: 28564782 NR Description: P0683C09.26
  misc_feature (5)..(258): NCBI GI NO: 28564782 NR Description: P0683C09.26
MSNLLALAILLLSTTPAPTAGEQTICSDATYERNSTYKSSLRSVAGALTGDAARLHSSTGAAGEGPDKVYGAVLCRADTAGADCARRLRDALAAITDGDGRSRCALHRDVAVYSELYQLRFSDRDFLADFSNAPEWVDVTNPGPVPLAVAARFDQRVTELLSALADAAAGRPGRWAVGEAPWSSSGGRDRAVYALAQCTLDMPPDHCRACLDGAMAERRRKVGGGKMGAAVFGARCTLRYEMDLQFFNVTGNSKMLSLLGKKKDRAFVIVATAYASAILCTRLLFWLLSVWRKQKRKMDLTEEPQNVDEILRSWRIEDASLEFSLYDFSQIADATVNFSPKNMIGEGGFGPVYKGVLTDGQEVAIKRLSARSRQGLVEFKNEIQVIAKLQHRNLVRLLGCCIHEEEKMLVYEYLTNKSLDHFIFDPIRQASLDWKRRIKIVDGIAQGLLYLHNLSRIRIIHRDLKAGNILLDSDLNPKISDFGMARIFPSDATQATASRLVGTYGYMAPEYVSDGLLSIKSDVFSFGVLLLEIISGKRSSGFQHNGEFYNLLEYAWELWKDRRWNEFIDQSFGDDYELEELMKYLAVALLCVQEKTVDRPTMPDVVAVLSSDGVTLPEPKQPAYSYAKVDVSVNVAVLSSRNDVTITTTNGR

SEQ ID NO: 41213 - protein, 451 aa, Zea mays subsp. mays
  peptide (1)..(451): Ceres Seq. ID no. 12364045
  misc_feature (96)..(449): NCBI GI NO: 34898768 NR Description: OJ1131_E05.8
  misc_feature (1)..(43): NCBI GI NO: 34898768 NR Description: OJ1131_E05.8
  misc_feature (1)..(439): NCBI GI NO: 33146474 NR Description: putative receptor-like protein kinase 4
  misc_feature (1)..(439): NCBI GI NO: 34898778 NR Description: OJ1131_E05.14
  misc_feature (106)..(446): NCBI GI NO: 34898776 NR Description: OJ1131_E05.12
  misc_feature (1)..(46): NCBI GI NO: 34898776 NR Description: OJ1131_E05.12
  misc_feature (96)..(451): NCBI GI NO: 33146472 NR Description: putative receptor-like protein kinase 4
  misc_feature (1)..(423): NCBI GI NO: 34899292 NR Description: receptor protein kinase-like protein
  misc_feature (1)..(451): NCBI GI NO: 28564782 NR Description: P0683C09.26
  misc_feature (1)..(57): NCBI GI NO: 28564782 NR Description: P0683C09.26
MPPDHCRACLDGAMAERRRKVGGGKMGAAVFGARCTLRYEMDLQFFNVTGNSKMLSLLGKKKDRAFVIVATAYASAILCTRLLFWLLSVWRKQKRKMDLTEEPQNVDEILRSWRIEDASLEFSLYDFSQIADATVNFSPKNMIGEGGFGPVYKGVLTDGQEVAIKRLSARSRQGLVEFKNEIQVIAKLQHRNLVRLLGCCIHEEEKMLVYEYLTNKSLDHFIFDPIRQASLDWKRRIKIVDGIAQGLLYLHNLSRIRIIHRDLKAGNILLDSDLNPKISDFGMARIFPSDATQATASRLVGTYGYMAPEYVSDGLLSIKSDVFSFGVLLLEIISGKRSSGFQHNGEFYNLLEYAWELWKDRRWNEFIDQSFGDDYELEELMKYLAVALLCVQEKTVDRPTMPDVVAVLSSDGVTLPEPKQPAYSYAKVDVSVNVAVLSSRNDVTITTTNGR

SEQ ID NO: 41214 - protein, 438 aa, Zea mays subsp. mays
  peptide (1)..(438): Ceres Seq. ID no. 12364046
  misc_feature (83)..(436): NCBI GI NO: 34898768 NR Description: OJ1131_E05.8
  misc_feature (1)..(30): NCBI GI NO: 34898768 NR Description: OJ1131_E05.8
  misc_feature (1)..(426): NCBI GI NO: 33146474 NR Description: putative receptor-like protein kinase 4
  misc_feature (1)..(426): NCBI GI NO: 34898778 NR Description: OJ1131_E05.14
  misc_feature (93)..(433): NCBI GI NO: 34898776 NR Description: OJ1131_E05.12
  misc_feature (1)..(33): NCBI GI NO: 34898776 NR Description: OJ1131_E05.12
  misc_feature (83)..(438): NCBI GI NO: 33146472 NR Description: putative receptor-like protein kinase 4
  misc_feature (1)..(410): NCBI GI NO: 34899292 NR Description: receptor protein kinase-like protein
  misc_feature (1)..(438): NCBI GI NO: 28564782 NR Description: P0683C09.26
  misc_feature (1)..(44): NCBI GI NO: 28564782 NR Description: P0683C09.26
MAERRRKVGGGKMGAAVFGARCTLRYEMDLQFFNVTGNSKMLSLLGKKKDRAFVIVATAYASAILCTRLLFWLLSVWRKQKRKMDLTEEPQNVDEILRSWRIEDASLEFSLYDFSQIADATVNFSPKNMIGEGGFGPVYKGVLTDGQEVAIKRLSARSRQGLVEFKNEIQVIAKLQHRNLVRLLGCCIHEEEKMLVYEYLTNKSLDHFIFDPIRQASLDWKRRIKIVDGIAQGLLYLHNLSRIRIIHRDLKAGNILLDSDLNPKISDFGMARIFPSDATQATASRLVGTYGYMAPEYVSDGLLSIKSDVFSFGVLLLEIISGKRSSGFQHNGEFYNLLEYAWELWKDRRWNEFIDQSFGDDYELEELMKYLAVALLCVQEKTVDRPTMPDVVAVLSSDGVTLPEPKQPAYSYAKVDVSVNVAVLSSRNDVTITTTNGR

SEQ ID NO: 41215 - DNA, 1292 bp, Zea mays subsp. mays
  misc_feature (1)..(1292): Ceres Seq. ID no. 12358774
ttgcacgacgtctccaccactacaccacacctcaagtccacaacaccaccagcctcgtctcagccgcttcagcataccacaccgcacgcaaacccaccgcgcgctacgaccaccaccgtcaccatggccgccgcgcgctacgacgtggagaagggcgggaggaataacggggatgggaagccttcgccgccgccgccgggccacctgtacccgcagcgcgacggggagagggagtggttgccgtggttggtgccgctcgtcgtggccgtcaacatcgtgctcttcgccgtggcgatgtacgtcaacaactgcccggcccacgccgcctcgtctcgccgcggcggcgccggatcatgcgtcgcccgcgggttcctccaccgcttctcgttccagccgctcagcgagaacccgctcctcgggccctcgtcggccacgctgcagaagctgggagcgcttgtatgggacaaagttgtgcgggagcaccaggggtggaggctcgtcacctgcatctggctgcacgccggtgttgcccacctcctggccaacatgatcagcctcgtgctcatcgggctcagactggagcaacagtttggatacgtgagagttggcatcatctaccttgtctctggcgtcggaggcagcgtgctttcgtctctgttcatcaggaacaacatctctgtcggcgcttccggagctctgttcgggctccttggggccatgctgtcggagctcttcaccaactggaccatctatgcaaacaaggctgcagccctggtgaccctgctggtcgtcatcgccatcaacctcgccatcggcatcctcccgcacgtcgacaacttcgcgcacatcggagggttcctcaccggcttcctcctcgggttcgtcttactgatgcgcccgcactacggctggatgcagcgctacgccctgccctccgacgtcaagtacaccaccaagaagtacctggcctaccagtgggctctgctggccgtggcctcggtcctcgctgtcatcgggttcgccgtagggctggggatgcttttcagaggagtgaacgcgaatgatcactgcggctggtgccactacctcagctgtgttccgacctccagatggagctgtgggaagtgaagatcggcgtgctgacaaaatggacttgaagccaggatagagcccatggccgcccatgggaccttttcgagcaagcatttccatgaatagatagatatacagctcgcagtcttactgtacataatgtcaccaggatgtggtttatatatgacattatttatgct

SEQ ID NO: 41216 - protein, 375 aa, Zea mays subsp. mays
  peptide (1)..(375): Ceres Seq. ID no. 12358775
  misc_feature (43)..(374): NCBI GI NO: 37536172 NR Description: putative membrane protein
  misc_feature (55)..(373): NCBI GI NO: 294845 NR Description: membrane protein
  misc_feature (45)..(373): NCBI GI NO: 15221690 NR Description: membrane protein, putative; protein id: At1g63120
  misc_feature (50)..(373): NCBI GI NO: 15240744 NR Description: membrane protein; protein id: At5g07250
  misc_feature (34)..(375): NCBI GI NO: 38344377 NR Description: OSJNBb0032E06.11
  misc_feature (77)..(375): NCBI GI NO: 30693911 NR Description: membrane protein, Rhomboid family
  misc_feature (75)..(373): NCBI GI NO: 15222058 NR Description: membrane protein, putative; protein id:At1g12750
  misc_feature (75)..(373): NCBI GI NO: 25402744 NR Description: protein T12C24.28
  misc_feature (77)..(375): NCBI GI NO: 11357824 NR Description: hypothetical protein F5K20
  misc_feature (76)..(372): NCBI GI NO: 15236387 NR Description: putative membrane protein; protein id: At4g23070.1
LHDVSTTTPHLKSTTPPASSQPLQHTTPHANPPRATTTTVTMAAARYDVEKGGRNNGDGKPSPPPPGHLYPQRDGEREWLPWLVPLVVAVNIVLFAVAMYVNNCPAHAASSRRGGAGSCVARGFLHRFSFQPLSENPLLGPSSATLQKLGALVWDKVVREHQGWRLVTCIWLHAGVAHLLANMISLVLIGLRLEQQFGYVRVGIIYLVSGVGGSVLSSLFIRNNISVGASGALFGLLGAMLSELFTNWTIYANKAAALVTLLVVIAINLAIGILPHVDNFAHIGGFLTGFLLGFVLLMRPHYGWMQRYALPSDVKYTTKKYLAYQWALLAVASVLAVIGFAVGLGMLFRGVNANDHCGWCHYLSCVPTSRWSCGK

SEQ ID NO: 41217 - protein, 334 aa, Zea mays subsp. mays
  peptide (1)..(334): Ceres Seq. ID no. 12358776
  misc_feature (2)..(333): NCBI GI NO: 37536172 NR Description: putative membrane protein
  misc_feature (14)..(332): NCBI GI NO: 294845 NR Description: membrane protein
  misc_feature (4)..(332): NCBI GI NO: 15221690 NR Description: membrane protein, putative; protein id: At1g63120
  misc_feature (9)..(332): NCBI GI NO: 15240744 NR Description: membrane protein; protein id: At5g07250
  misc_feature (1)..(334): NCBI GI NO: 38344377 NR Description: OSJNBb0032E06.11
  misc_feature (36)..(334): NCBI GI NO: 30693911 NR Description: membrane protein, Rhomboid family
  misc_feature (34)..(332): NCBI GI NO: 15222058 NR Description: membrane protein, putative; protein id:At1g12750
  misc_feature (34)..(332): NCBI GI NO: 25402744 NR Description: protein T12C24.28
  misc_feature (36)..(334): NCBI GI NO: 11357824 NR Description: hypothetical protein F5K20
  misc_feature (35)..(331): NCBI GI NO: 15236387 NR Description: putative membrane protein; protein id: At4g23070.1
MAAARYDVEKGGRNNGDGKPSPPPPGHLYPQRDGEREWLPWLVPLVVAVNIVLFAVAMYVNNCPAHAASSRRGGAGSCVARGFLHRFSFQPLSENPLLGPSSATLQKLGALVWDKVVREHQGWRLVTCIWLHAGVAHLLANMISLVLIGLRLEQQFGYVRVGIIYLVSGVGGSVLSSLFIRNNISVGASGALFGLLGAMLSELFTNWTIYANKAAALVTLLVVIAINLAIGILPHVDNFAHIGGFLTGFLLGFVLLMRPHYGWMQRYALPSDVKYTTKKYLAYQWALLAVASVLAVIGFAVGLGMLFRGVNANDHCGWCHYLSCVPTSRWSCGK

SEQ ID NO: 41218 - protein, 277 aa, Zea mays subsp. mays
  peptide (1)..(277): Ceres Seq. ID no. 12358777
  misc_feature (1)..(276): NCBI GI NO: 37536172 NR Description: putative membrane protein
  misc_feature (1)..(275): NCBI GI NO: 294845 NR Description: membrane protein
  misc_feature (1)..(275): NCBI GI NO: 15221690 NR Description: membrane protein, putative; protein id: At1g63120
  misc_feature (1)..(275): NCBI GI NO: 15240744 NR Description: membrane protein; protein id: At5g07250
  misc_feature (1)..(277): NCBI GI NO: 38344377 NR Description: OSJNBb0032E06.11
  misc_feature (1)..(277): NCBI GI NO: 30693911 NR Description: membrane protein, Rhomboid family
  misc_feature (1)..(275): NCBI GI NO: 15222058 NR Description: membrane protein, putative; protein id:At1g12750
  misc_feature (1)..(275): NCBI GI NO: 25402744 NR Description: protein T12C24.28
  misc_feature (1)..(277): NCBI GI NO: 11357824 NR Description: hypothetical protein F5K20
  misc_feature (1)..(274): NCBI GI NO: 15236387 NR Description: putative membrane protein; protein id: At4g23070.1
MYVNNCPAHAASSRRGGAGSCVARGFLHRFSFQPLSENPLLGPSSATLQKLGALVWDKVVREHQGWRLVTCIWLHAGVAHLLANMISLVLIGLRLEQQFGYVRVGIIYLVSGVGGSVLSSLFIRNNISVGASGALFGLLGAMLSELFTNWTIYANKAAALVTLLVVIAINLAIGILPHVDNFAHIGGFLTGFLLGFVLLMRPHYGWMQRYALPSDVKYTTKKYLAYQWALLAVASVLAVIGFAVGLGMLFRGVNANDHCGWCHYLSCVPTSRWSCGK

SEQ ID NO: 41219 - DNA, 1065 bp, Zea mays subsp. mays
  misc_feature (1)..(1065): Ceres Seq. ID no. 12419192
aacacgtgagctctttttgcagtctgctcgctggcgattgcgattcccaccagtcccccagccccaggcacgaaacctaacccacccaagcggcaaccatggagccctcccccatcggcgccagcggctcggcggagcggtggcgcgcggaggcggcgcgggcgttccagcactacctggaccgctcggcgccgcacacggcggggcggtgggcgggcacgctcgtggccgcggcggtgtacgcgctgcgggtctactacgtgcggggcttctacgtcgtcacctacgggctgggcatctacctgatcaacctcctcatcggcttcctctcccccatggtcgaaccggagctcgaggccgggcccgggctcccaaccagcggctccgacgagttcaagcccttcatccgtcgcctccccgagttcaagttctggtatgccgtcacaaaagccttttgcattgcctttgtcatgaccttcttctctgtattcgacgttcctgtcttttggccaatacttctctgttattggattgtgctttttgtcctgacaatgaagcgacaaattgtgcatatgatcaagtacaagtatgtcccattcagcataggaaagcagaggtatggcggaaagaaaggccctgccgccagtgcatctaaggagtaaagacggagggagggtgtgggacctcgagagcagtgcatgtgctatctttgagggcatcctgctggcatggtggtattttgagtaccagggctactgatagtgaacgcacaccatattcgctagtggagagtggagattgcagagaagctgaccagacttttgcattggttgatgatttctgttttacgtgtcggtagtttatgtacaatggcatggagcatagctagtagatcaaatttccggatcctctgttgtactgtccctttgtggacaagttgtggacctgttggatccttgcaaacgcattgtgatccaggacctagaggacaaaatcaaactgtccagcgattgttacttggaccttccaacattgactgcatactagtaccagcgattcgtagcc

SEQ ID NO: 41220 - protein, 217 aa, Zea mays subsp. mays
  peptide (1)..(217): Ceres Seq. ID no. 12419193
TRELFLQSARWRLRFPPVPQPQARNLTHPSGNHGALPHRRQRLGGAVARGGGAGVPALPGPLGAAHGGAVGGHARGRGGVRAAGLLRAGLLRRHLRAGHLPDQPPHRLPLPHGRTGARGRARAPNQRLRRVQALHPSPPRVQVLVCRHKSLLHCLCHDLLLCIRRSCLLANTSLLLDCAFCPDNEATNCAYDQVQVCPIQHRKAEVWRKERPCRQCI

SEQ ID NO: 41221 - protein, 187 aa, Zea mays subsp. mays
  peptide (1)..(187): Ceres Seq. ID no. 12419194
  misc_feature (7)..(173): Pfam Name: Pfam Description:  Rer1 family
  misc_feature (7)..(173): NCBI GI NO: 34894094 NR Description: putative Rer1A protein (AtRer1A)
  misc_feature (7)..(184): NCBI GI NO: 15234975 NR Description: AtRer1A; protein id: At4g39220
  misc_feature (18)..(183): NCBI GI NO: 11281669 NR Description: endoplasmatic reticulum retrieval protein Rer1B
  misc_feature (18)..(183): NCBI GI NO: 15226596 NR Description: AtRer1B; protein id: At2g21600
  misc_feature (2)..(171): NCBI GI NO: 18398679 NR Description: putative integral membrane protein
  misc_feature (2)..(171): NCBI GI NO: 30680307 NR Description: integral membrane protein -related
  misc_feature (2)..(171): NCBI GI NO: 25411844 NR Description: probable integral membrane protein
  misc_feature (24)..(184): NCBI GI NO: 18400234 NR Description: putative integral membrane protein
  misc_feature (24)..(184): NCBI GI NO: 30682033 NR Description: integral membrane protein -related
  misc_feature (24)..(172): NCBI GI NO: 7488292 NR Description: probable integral membrane protein At2g23310
MEPSPIGASGSAERWRAEAARAFQHYLDRSAPHTAGRWAGTLVAAAVYALRVYYVRGFYVVTYGLGIYLINLLIGFLSPMVEPELEAGPGLPTSGSDEFKPFIRRLPEFKFWYAVTKAFCIAFVMTFFSVFDVPVFWPILLCYWIVLFVLTMKRQIVHMIKYKYVPFSIGKQRYGGKKGPAASASKE

SEQ ID NO: 41222 - protein, 108 aa, Zea mays subsp. mays
  peptide (1)..(108): Ceres Seq. ID no. 12419195
  misc_feature (1)..(94): Pfam Name: Pfam Description:  Rer1 family
  misc_feature (1)..(94): NCBI GI NO: 34894094 NR Description: putative Rer1A protein (AtRer1A)
  misc_feature (1)..(105): NCBI GI NO: 15234975 NR Description: AtRer1A; protein id: At4g39220
  misc_feature (1)..(104): NCBI GI NO: 11281669 NR Description: endoplasmatic reticulum retrieval protein Rer1B
  misc_feature (1)..(104): NCBI GI NO: 15226596 NR Description: AtRer1B; protein id: At2g21600
  misc_feature (1)..(92): NCBI GI NO: 18398679 NR Description: putative integral membrane protein
  misc_feature (1)..(92): NCBI GI NO: 25411844 NR Description: probable integral membrane protein
  misc_feature (1)..(92): NCBI GI NO: 30680307 NR Description: integral membrane protein -related
  misc_feature (1)..(105): NCBI GI NO: 18400234 NR Description: putative integral membrane protein
  misc_feature (1)..(105): NCBI GI NO: 30682033 NR Description: integral membrane protein -related
  misc_feature (1)..(93): NCBI GI NO: 7488292 NR Description: probable integral membrane protein At2g23310
MVEPELEAGPGLPTSGSDEFKPFIRRLPEFKFWYAVTKAFCIAFVMTFFSVFDVPVFWPILLCYWIVLFVLTMKRQIVHMIKYKYVPFSIGKQRYGGKKGPAASASKE

SEQ ID NO: 41223 - DNA, 986 bp, Zea mays subsp. mays
  misc_feature (1)..(986): Ceres Seq. ID no. 12350239
aattttggactggcgaagaaaatgcaggcccccctgctgctgctgcacgtccgtcaaatagattggtagggagcccagagggtgatgggaatggcgaaggagcagcacttcgtgcttgttcatggcgaagggcatggggcctggtgctggttcaagctccgctggctcctcgagggcgctggccaccgtgtcacgtgcgttgacctggccggaggcggcgtcgatcctaccgaccccaacaccatccggtccttcaagcagtacgacaagccgctcatagacctcatctccaacttgccagacggagagaaggtgattctgatcggacatggcgctggagggctgagtgtgatccatgcaatgcatgaatttgttgacaggatcggtcaagcatttttcgtggccgccacaatgctgccgtttggatttcaagccgatgaagataagaacgatgggttaccgactttgcccgagaacgagattgagttgacacttggtgcaggagcagatgatcctccaacaaccattgccttgaggccagaattccagcgtgatcgactatcacaacaaagccctgaagaggaatcagtacttgcttcaatgctgatgcgtccgtggcctgcaacagctatcagtacagcaagcttcgaaggagatgatgagagattgaaccgaatcaaacgaactttcataaagatggagcgcgaccacatgctggatcctcaacagcaagactccatgatcaaaaagtggccacccagtgaggttttggtcatagatacagatcacagccccttcttctctgcaccagaacagctgttcaatttaatagtcaaatctctatgatgacaaatgcagaaagctactgactggggttgcccaaattcttgtaacactacccacaaacaataatcaccacaagatttaggacctcagatttgtcaaacatgcttctcaatgaatcttcctggcatatccgcatatct

SEQ ID NO: 41224 - protein, 253 aa, Zea mays subsp. mays
  peptide (1)..(253): Ceres Seq. ID no. 12350240
  misc_feature (36)..(251): Pfam Name: Pfam Description:  alpha/beta hydrolase fold
  misc_feature (5)..(252): NCBI GI NO: 15228391 NR Description: putative alpha-hydroxynitrile lyase
  misc_feature (6)..(252): NCBI GI NO: 15237165 NR Description: polyneuridine aldehyde esterase-like
  misc_feature (8)..(253): NCBI GI NO: 15866583 NR Description: hypothetical protein [Capsella rubella]
  misc_feature (8)..(253): NCBI GI NO: 15235844 NR Description: cyanohydrin lyase like protein
  misc_feature (9)..(251): NCBI GI NO: 15218463 NR Description: polyneuridine aldehyde esterase, putative
  misc_feature (9)..(251): NCBI GI NO: 21595837 NR Description: polyneuridine aldehyde esterase, putative
  misc_feature (9)..(251): NCBI GI NO: 25518661 NR Description: hypothetical protein F12G12
  misc_feature (5)..(251): NCBI GI NO: 15227865 NR Description: putative acetone-cyanohydrin lyase
  misc_feature (8)..(251): NCBI GI NO: 15230077 NR Description: alpha/beta hydrolase, putative
  misc_feature (5)..(251): NCBI GI NO: 30681236 NR Description: hydrolase family [Arabidopsis thaliana]
MGMAKEQHFVLVHGEGHGAWCWFKLRWLLEGAGHRVTCVDLAGGGVDPTDPNTIRSFKQYDKPLIDLISNLPDGEKVILIGHGAGGLSVIHAMHEFVDRIGQAFFVAATMLPFGFQADEDKNDGLPTLPENEIELTLGAGADDPPTTIALRPEFQRDRLSQQSPEEESVLASMLMRPWPATAISTASFEGDDERLNRIKRTFIKMERDHMLDPQQQDSMIKKWPPSEVLVIDTDHSPFFSAPEQLFNLIVKSL

SEQ ID NO: 41225 - protein, 251 aa, Zea mays subsp. mays
  peptide (1)..(251): Ceres Seq. ID no. 12350241
  misc_feature (34)..(249): Pfam Name: Pfam Description:  alpha/beta hydrolase fold
  misc_feature (3)..(250): NCBI GI NO: 15228391 NR Description: putative alpha-hydroxynitrile lyase
  misc_feature (4)..(250): NCBI GI NO: 15237165 NR Description: polyneuridine aldehyde esterase-like
  misc_feature (6)..(251): NCBI GI NO: 15866583 NR Description: hypothetical protein [Capsella rubella]
  misc_feature (6)..(251): NCBI GI NO: 15235844 NR Description: cyanohydrin lyase like protein
  misc_feature (7)..(249): NCBI GI NO: 15218463 NR Description: polyneuridine aldehyde esterase, putative
  misc_feature (7)..(249): NCBI GI NO: 25518661 NR Description: hypothetical protein F12G12
  misc_feature (7)..(249): NCBI GI NO: 21595837 NR Description: polyneuridine aldehyde esterase, putative
  misc_feature (3)..(249): NCBI GI NO: 15227865 NR Description: putative acetone-cyanohydrin lyase
  misc_feature (6)..(249): NCBI GI NO: 15230077 NR Description: alpha/beta hydrolase, putative
  misc_feature (3)..(249): NCBI GI NO: 30681236 NR Description: hydrolase family [Arabidopsis thaliana]
MAKEQHFVLVHGEGHGAWCWFKLRWLLEGAGHRVTCVDLAGGGVDPTDPNTIRSFKQYDKPLIDLISNLPDGEKVILIGHGAGGLSVIHAMHEFVDRIGQAFFVAATMLPFGFQADEDKNDGLPTLPENEIELTLGAGADDPPTTIALRPEFQRDRLSQQSPEEESVLASMLMRPWPATAISTASFEGDDERLNRIKRTFIKMERDHMLDPQQQDSMIKKWPPSEVLVIDTDHSPFFSAPEQLFNLIVKSL

SEQ ID NO: 41226 - protein, 161 aa, Zea mays subsp. mays
  peptide (1)..(161): Ceres Seq. ID no. 12350242
  misc_feature (1)..(159): Pfam Name: Pfam Description:  alpha/beta hydrolase fold
  misc_feature (1)..(160): NCBI GI NO: 15228391 NR Description: putative alpha-hydroxynitrile lyase
  misc_feature (1)..(160): NCBI GI NO: 15237165 NR Description: polyneuridine aldehyde esterase-like
  misc_feature (1)..(161): NCBI GI NO: 15866583 NR Description: hypothetical protein [Capsella rubella]
  misc_feature (1)..(161): NCBI GI NO: 15235844 NR Description: cyanohydrin lyase like protein
  misc_feature (1)..(159): NCBI GI NO: 15218463 NR Description: polyneuridine aldehyde esterase, putative
  misc_feature (1)..(159): NCBI GI NO: 21595837 NR Description: polyneuridine aldehyde esterase, putative
  misc_feature (1)..(159): NCBI GI NO: 25518661 NR Description: hypothetical protein F12G12
  misc_feature (1)..(159): NCBI GI NO: 15227865 NR Description: putative acetone-cyanohydrin lyase
  misc_feature (1)..(159): NCBI GI NO: 15230077 NR Description: alpha/beta hydrolase, putative
  misc_feature (1)..(159): NCBI GI NO: 30681236 NR Description: hydrolase family [Arabidopsis thaliana]
MHEFVDRIGQAFFVAATMLPFGFQADEDKNDGLPTLPENEIELTLGAGADDPPTTIALRPEFQRDRLSQQSPEEESVLASMLMRPWPATAISTASFEGDDERLNRIKRTFIKMERDHMLDPQQQDSMIKKWPPSEVLVIDTDHSPFFSAPEQLFNLIVKSL

SEQ ID NO: 41227 - DNA, 2237 bp, Zea mays subsp. mays
  misc_feature (1)..(2237): Ceres Seq. ID no. 12368411
gcacgagaccattacctagaacatcctaatcgaaaaatctcccagccccgctccccaaatctcagccccgctccttcccagtcccagtcccagatccaggatgtcctcctccgacccggacgacgcccccgacgggggcgaggactcgcccctcttccgccgcagcggggggccgtcctccggcggcaccgttggcgacgtccccgtctcgcagtcgctcatcaaggcggcaagcaacgtgtgcttctccctcttcgtgctcgccgtccttgtcgtcaccgtcgtcgccgtcacataccagccgccggacccctggctccagtcctccgccgccatcaccacctcgctctcccgcgtcctccccaactccaccttcctcgtccccgacgactcgctcctccccaccggcgaggatttcaactcctccaccgccgtcccagccccggtgcgggatgacgatgacgcggctgcggccgtcagcgccgcctccgccgcggccgcgggcaacaggacctgcgacccggacgcgccgctgaactgctccgacccgcgcgtcctcgccgccgtcaaggcgttcaacgccagggccttcttccggaagtccatcgtgtttctcagctacgaggcgccggtgtccggccccaagcctggccagtgcgatgtcgcctggaggttccggaaccgccgggagaagtcgtggcgccgctacagggactaccgtcgcttcagcctcgcctcgggcgatggctgcgctcttgacatcgtcagcgtcggcaagttccgctcggggacgaatgcagctcgccggccgtatcctaagggctcgaagtcgaagaggccccgcgtgtcgccgccgcctgtcgatgcggagatcaatgacacaatccctgtcgtcggatcagaggcagagttcaagaagggaaagtacttgtactacatgagaggaggtgaccattgcaagagcatgaaccagttcgtctggagcttcttgtgtggactcggcgaagccaagttcctcaaccggacgttcgtgatggatctgaacatctgtttgtccggggcacacacggtcgacgggaaggatgtggatgggaaagatttcccggtactatttcgatttcgagcacttgaaggagagtgtgccggtggtggaggaaggggacttcctgaaggattggaagcgttgggataagaagaagggcccaggacggatcacagtgcggaaggttccatcgtacaaggtaacaccaatgcagctgaagagggacaagagcaacatcatctggaggcaatttaatggccatgagcccgagaattactggtaccgagtttgcgaaggacgagctgccaaagtcatccaaaggccttggtatgctatctggaagtccaagagactgatgaacattgtgactgagattgcaggtaggatggattgggattacgacggtttacatgttgtccgagggtggaaggcgcagaacaagcaaatgtatccaaacctggattccgacacgtcgcctgatgcgctcgttgataaggtgaccaagcttgttaagccgatgagagatctctacatcgcaactaatgagccattctataactacttcgacaagctcaggtcacacttccatgtccatttgcttgatgattacaaggagctttggtcaaacactagtgaatggtacaacgagacaacaacacttagtcggggtaaaccagttccattcgacgcctacatgagggtgattgtggacactgaggtattttacagatcgaagacacaggttgagacgttcaacaacttgacaagggattgcaaagatggaatcaatacgtgcaacttgtgacacatgagttcacgcttcggatcatttgttggtgttcaatatacccttctagtggctggaacatcagaactcagtggaactcatccagggtttgtcttttggcattaccatcgttatgtatttcttgtcatggaatgtttagctggtttcatgtttatctgagttgtgtgctctccatttttttttttcttttgtagtttatgtactactcttccagagtccagacgtccgaaaaatttgtatttagtgggcaatctgcaacatctatgctctctgtacccgcactaaattaagtgagaactatagcttcacctttacagtgtatctgttttcacgagtcacacgcttcttgcccgaatatttggaggaaatgaatttgtcagtgagctc

SEQ ID NO: 41228 - protein, 363 aa, Zea mays subsp. mays
  peptide (1)..(363): Ceres Seq. ID no. 12368412
  misc_feature (1)..(344): NCBI GI NO: 34913308 NR Description: P0519E12.32
  misc_feature (35)..(344): NCBI GI NO: 15236611 NR Description: putative protein; protein id: At4g08810
  misc_feature (18)..(344): NCBI GI NO: 18395698 NR Description: expressed protein; protein id: At2g04280
  misc_feature (22)..(344): NCBI GI NO: 15235454 NR Description: putative protein; protein id: At4g12700.1
  misc_feature (20)..(134): NCBI GI NO: 37534994 NR Description: unknown protein
  misc_feature (254)..(344): NCBI GI NO: 37534994 NR Description: unknown protein
  misc_feature (171)..(332): NCBI GI NO: 34909040 NR Description: P0034E02.33
MSSSDPDDAPDGGEDSPLFRRSGGPSSGGTVGDVPVSQSLIKAASNVCFSLFVLAVLVVTVVAVTYQPPDPWLQSSAAITTSLSRVLPNSTFLVPDDSLLPTGEDFNSSTAVPAPVRDDDDAAAAVSAASAAAAGNRTCDPDAPLNCSDPRVLAAVKAFNARAFFRKSIVFLSYEAPVSGPKPGQCDVAWRFRNRREKSWRRYRDYRRFSLASGDGCALDIVSVGKFRSGTNAARRPYPKGSKSKRPRVSPPPVDAEINDTIPVVGSEAEFKKGKYLYYMRGGDHCKSMNQFVWSFLCGLGEAKFLNRTFVMDLNICLSGAHTVDGKDVDGKDFPVLFRFRALEGECAGGGGRGLPEGLEALG

SEQ ID NO: 41229 - protein, 254 aa, Zea mays subsp. mays
  peptide (1)..(254): Ceres Seq. ID no. 12368413
  misc_feature (1)..(254): NCBI GI NO: 34913308 NR Description: P0519E12.32
  misc_feature (1)..(252): NCBI GI NO: 15236611 NR Description: putative protein; protein id: At4g08810
  misc_feature (1)..(253): NCBI GI NO: 18395698 NR Description: expressed protein; protein id: At2g04280
  misc_feature (1)..(254): NCBI GI NO: 15235454 NR Description: putative protein; protein id: At4g12700.1
  misc_feature (8)..(252): NCBI GI NO: 37534994 NR Description: unknown protein
  misc_feature (1)..(236): NCBI GI NO: 34909040 NR Description: P0034E02.33
MWMGKISRYYFDFEHLKESVPVVEEGDFLKDWKRWDKKKGPGRITVRKVPSYKVTPMQLKRDKSNIIWRQFNGHEPENYWYRVCEGRAAKVIQRPWYAIWKSKRLMNIVTEIAGRMDWDYDGLHVVRGWKAQNKQMYPNLDSDTSPDALVDKVTKLVKPMRDLYIATNEPFYNYFDKLRSHFHVHLLDDYKELWSNTSEWYNETTTLSRGKPVPFDAYMRVIVDTEVFYRSKTQVETFNNLTRDCKDGINTCNL

SEQ ID NO: 41230 - protein, 252 aa, Zea mays subsp. mays
  peptide (1)..(252): Ceres Seq. ID no. 12368414
  misc_feature (1)..(252): NCBI GI NO: 34913308 NR Description: P0519E12.32
  misc_feature (1)..(250): NCBI GI NO: 15236611 NR Description: putative protein; protein id: At4g08810
  misc_feature (1)..(251): NCBI GI NO: 18395698 NR Description: expressed protein; protein id: At2g04280
  misc_feature (1)..(252): NCBI GI NO: 15235454 NR Description: putative protein; protein id: At4g12700.1
  misc_feature (6)..(250): NCBI GI NO: 37534994 NR Description: unknown protein
  misc_feature (1)..(234): NCBI GI NO: 34909040 NR Description: P0034E02.33
MGKISRYYFDFEHLKESVPVVEEGDFLKDWKRWDKKKGPGRITVRKVPSYKVTPMQLKRDKSNIIWRQFNGHEPENYWYRVCEGRAAKVIQRPWYAIWKSKRLMNIVTEIAGRMDWDYDGLHVVRGWKAQNKQMYPNLDSDTSPDALVDKVTKLVKPMRDLYIATNEPFYNYFDKLRSHFHVHLLDDYKELWSNTSEWYNETTTLSRGKPVPFDAYMRVIVDTEVFYRSKTQVETFNNLTRDCKDGINTCNL

SEQ ID NO: 41231 - DNA, 1417 bp, Zea mays subsp. mays
  misc_feature (1)..(1417): Ceres Seq. ID no. 12633968
gcacgagaccattacctagaacatcctaatcgaaaaagaaaaaggcttcgccttggtccttggatccccccacacaacgcagcacccgcactctccaggcgtctgccaatccgaaacgaaacccacccgtaggcaaaccaggactgagattgagctgagagcagcacagtcatggcggggcaggaggtggcgaacaagcgggtggtactgaagcgctacgtgacggggttccccggcgcggacgacatggaggtggtcaccggcaccgcgcgcgtggccgtgccgccggggtcgacggccatggtgctcaagaacctctacgtgtcgtgcgacccttacatgcgcggccgtatgaccaagcacgagaggcccagctacgtcccggacttcgtcgtgggggaggttttggaaaactttggcgtctgcaaggtgatagcatctgggcaccaggatttcaaggttggggatcttgtgtgggggatgaccggatgggaggagtacactctcatccataacccggagtcatttttcaagatcaatcatcctgaattgcctctgtcctactacacaggcgttcttggcatgccgggccttactgcttgggctggatttttcgatgtgggcaagcccaagaaaggcgataatgtcttcgtctcagcagcatcaggagccgttggtcagcttgttgggcagtttgctaagctcacaggatgttatgttgtcggcagtgctggttctgacgagaaggttaatcttctgaaaacaaagtttggcttcgatgaagcattcaactacaagaaagagcaggacctcgatgccgccttgagaaggtacttcccagagggcattgacatctacttcgagaacgtgggtggcagcacactggaagccgtgcttcccaacatgcgtatccatggtcggatccctacctgcggaatgatctcgcagtacaatctggaggagccagagggtgtgcacaacctattcgaaatcatcgctaagcgcctgcgcatggagggtttcatggtcttcgactactacggccagtaccacaagttcgagcaagagatggccgggtacctcaaggcggggaagatagcctacgtcgaggacattgctgaggggctagagaaggcgccggaggcactcatcgggctcttcaccgggcgcaacgtcggcaagcaactggtcgccattgcgcgggaatgaatgctggacatccatattatatctacgttgagaataatgtcagcatgcgtgttcagatgtgttaggaattgatgatttgtagtgcttgcagttttgtgctgttcgtgtgaaatgtttcgattttctgccgtttgttttctgggcgatatgcgtgtgaaaactcagcacacgcgcttcttctgaggagaaatagacaagcagtttgccg

SEQ ID NO: 41232 - protein, 345 aa, Zea mays subsp. mays
  peptide (1)..(345): Ceres Seq. ID no. 12633969
  misc_feature (95)..(342): Pfam Name: Pfam Description:  Zinc-binding dehydrogenase
  misc_feature (4)..(345): NCBI GI NO: 6692816 NR Description: allyl alcohol dehydrogenase [Nicotiana tabacum]
  misc_feature (8)..(345): NCBI GI NO: 38345384 NR Description: OSJNBa0067K08.13
  misc_feature (6)..(345): NCBI GI NO: 15228456 NR Description: putative NADP-dependent oxidoreductase
  misc_feature (6)..(345): NCBI GI NO: 21593645 NR Description: allyl alcohol dehydrogenase, putative
  misc_feature (6)..(345): NCBI GI NO: 15222685 NR Description: allyl alcohol dehydrogenase, putative
  misc_feature (8)..(345): NCBI GI NO: 21536967 NR Description: quinone oxidoreductase-like protein
  misc_feature (8)..(345): NCBI GI NO: 17529140 NR Description: putative quinone oxidoreductase
  misc_feature (8)..(345): NCBI GI NO: 15237890 NR Description: quinone oxidoreductase - like protein
  misc_feature (8)..(345): NCBI GI NO: 22326861 NR Description: quinone oxidoreductase - like protein
  misc_feature (8)..(345): NCBI GI NO: 15240810 NR Description: quinone oxidoreductase -like protein
MAGQEVANKRVVLKRYVTGFPGADDMEVVTGTARVAVPPGSTAMVLKNLYVSCDPYMRGRMTKHERPSYVPDFVVGEVLENFGVCKVIASGHQDFKVGDLVWGMTGWEEYTLIHNPESFFKINHPELPLSYYTGVLGMPGLTAWAGFFDVGKPKKGDNVFVSAASGAVGQLVGQFAKLTGCYVVGSAGSDEKVNLLKTKFGFDEAFNYKKEQDLDAALRRYFPEGIDIYFENVGGSTLEAVLPNMRIHGRIPTCGMISQYNLEEPEGVHNLFEIIAKRLRMEGFMVFDYYGQYHKFEQEMAGYLKAGKIAYVEDIAEGLEKAPEALIGLFTGRNVGKQLVAIARE

SEQ ID NO: 41233 - protein, 320 aa, Zea mays subsp. mays
  peptide (1)..(320): Ceres Seq. ID no. 12633970
  misc_feature (70)..(317): Pfam Name: Pfam Description:  Zinc-binding dehydrogenase
  misc_feature (1)..(320): NCBI GI NO: 6692816 NR Description: allyl alcohol dehydrogenase [Nicotiana tabacum]
  misc_feature (1)..(320): NCBI GI NO: 38345384 NR Description: OSJNBa0067K08.13
  misc_feature (1)..(320): NCBI GI NO: 15228456 NR Description: putative NADP-dependent oxidoreductase
  misc_feature (1)..(320): NCBI GI NO: 21593645 NR Description: allyl alcohol dehydrogenase, putative
  misc_feature (1)..(320): NCBI GI NO: 15222685 NR Description: allyl alcohol dehydrogenase, putative
  misc_feature (1)..(320): NCBI GI NO: 21536967 NR Description: quinone oxidoreductase-like protein
  misc_feature (1)..(320): NCBI GI NO: 17529140 NR Description: putative quinone oxidoreductase
  misc_feature (1)..(320): NCBI GI NO: 15237890 NR Description: quinone oxidoreductase - like protein
  misc_feature (1)..(320): NCBI GI NO: 22326861 NR Description: quinone oxidoreductase - like protein
  misc_feature (1)..(320): NCBI GI NO: 15240810 NR Description: quinone oxidoreductase -like protein
MEVVTGTARVAVPPGSTAMVLKNLYVSCDPYMRGRMTKHERPSYVPDFVVGEVLENFGVCKVIASGHQDFKVGDLVWGMTGWEEYTLIHNPESFFKINHPELPLSYYTGVLGMPGLTAWAGFFDVGKPKKGDNVFVSAASGAVGQLVGQFAKLTGCYVVGSAGSDEKVNLLKTKFGFDEAFNYKKEQDLDAALRRYFPEGIDIYFENVGGSTLEAVLPNMRIHGRIPTCGMISQYNLEEPEGVHNLFEIIAKRLRMEGFMVFDYYGQYHKFEQEMAGYLKAGKIAYVEDIAEGLEKAPEALIGLFTGRNVGKQLVAIARE

SEQ ID NO: 41234 - protein, 302 aa, Zea mays subsp. mays
  peptide (1)..(302): Ceres Seq. ID no. 12633971
  misc_feature (52)..(299): Pfam Name: Pfam Description:  Zinc-binding dehydrogenase
  misc_feature (1)..(302): NCBI GI NO: 6692816 NR Description: allyl alcohol dehydrogenase [Nicotiana tabacum]
  misc_feature (1)..(302): NCBI GI NO: 38345384 NR Description: OSJNBa0067K08.13
  misc_feature (1)..(302): NCBI GI NO: 15228456 NR Description: putative NADP-dependent oxidoreductase
  misc_feature (1)..(302): NCBI GI NO: 21593645 NR Description: allyl alcohol dehydrogenase, putative
  misc_feature (1)..(302): NCBI GI NO: 15222685 NR Description: allyl alcohol dehydrogenase, putative
  misc_feature (1)..(302): NCBI GI NO: 21536967 NR Description: quinone oxidoreductase-like protein
  misc_feature (1)..(302): NCBI GI NO: 17529140 NR Description: putative quinone oxidoreductase
  misc_feature (1)..(302): NCBI GI NO: 15237890 NR Description: quinone oxidoreductase - like protein
  misc_feature (1)..(302): NCBI GI NO: 22326861 NR Description: quinone oxidoreductase - like protein
  misc_feature (1)..(302): NCBI GI NO: 15240810 NR Description: quinone oxidoreductase -like protein
MVLKNLYVSCDPYMRGRMTKHERPSYVPDFVVGEVLENFGVCKVIASGHQDFKVGDLVWGMTGWEEYTLIHNPESFFKINHPELPLSYYTGVLGMPGLTAWAGFFDVGKPKKGDNVFVSAASGAVGQLVGQFAKLTGCYVVGSAGSDEKVNLLKTKFGFDEAFNYKKEQDLDAALRRYFPEGIDIYFENVGGSTLEAVLPNMRIHGRIPTCGMISQYNLEEPEGVHNLFEIIAKRLRMEGFMVFDYYGQYHKFEQEMAGYLKAGKIAYVEDIAEGLEKAPEALIGLFTGRNVGKQLVAIARE

SEQ ID NO: 41235 - DNA, 1051 bp, Zea mays subsp. mays
  misc_feature (1)..(1051): Ceres Seq. ID no. 12387956
gcacgagaccattacctagaacatcctaatcgaaaaaaggaaacgagaagacaaggcctccgcggctccgcccccgatgcctccgctcctcacctcacccgcctccctcccctccgcctcccctctcctcgtctcctgtatcggcgctctccaccgccccggccccttcctccaccagcgcgccgccgcctcggtccacttcctcgcgccgcacaggaagacccgaccgccccccgcgatgagctggcttgggaagctgggcctgagcgggcttggaggcagcccgcgcgcgtcggaggcgtcggcagcgctggcgcaggggcccgacgaggaccagcccgcgccggggaacgagttcgcgcaattcggcgccggctgcttctggggcgtggagctcgcgttccagctcgtgccgggagtcacccgcacggaggtcggctacagccagggcaacatccacgatccgacctacgaggacgtctgcaccggcaccacaaaccacaacgaggtcgtccgcgtgcagtacgacccggccgcctgcaagtacgacgacctcctcgacaccttctgggcgcgccacgaccccactactcccaaccgacagggcaatgatgttggaacacagtataggtcagggatatactactataacccagagcaggagaaggcggcaagagagtccctggagaagcagcagaagcttctgaaccggaagatcgtcaccgagatcgttccagcgaagaggttctatagagcagaagagtaccatcagcagtacctggagaagggcggccgcttcggcttcgggcaatctgcagccaagggctgcaatgaccccatccgatgctacggatgagccaaatggacctctacgtgcatggtgtgaatcgtaactgaataagggatgcatcaaagccagattttatactgctttcctaggtttgttttgccactattgaacggctgtaagagtttagctatatactaccatggtactccaatcatcgtgtacaaaaccatattgtattacatgcaagtgcgagtgagattt

SEQ ID NO: 41236 - protein, 259 aa, Zea mays subsp. mays
  peptide (1)..(259): Ceres Seq. ID no. 12387957
  misc_feature (93)..(246): Pfam Name: Pfam Description:  Peptide methionine sulfoxide reductase
  misc_feature (55)..(259): NCBI GI NO: 37536896 NR Description: putative peptide methionine sulfoxide reductase
  misc_feature (6)..(259): NCBI GI NO: 12230349 NR Description: Peptide methionine sulfoxide reductase
  misc_feature (30)..(259): NCBI GI NO: 29469000 NR Description: peptide methionine sulfoxide reductase; cPMSR
  misc_feature (1)..(259): NCBI GI NO: 21593143 NR Description: protein-methionine-S-oxide reductase
  misc_feature (65)..(259): NCBI GI NO: 21592658 NR Description: peptide methionine sulfoxide reductase (msr)
  misc_feature (1)..(259): NCBI GI NO: 15234942 NR Description: protein-methionine-S-oxide reductase
  misc_feature (1)..(259): NCBI GI NO: 15146324 NR Description: AT4g25130/F13M23_270 [Arabidopsis thaliana]
  misc_feature (65)..(259): NCBI GI NO: 15240796 NR Description: peptide methionine sulfoxide reductase
  misc_feature (1)..(259): NCBI GI NO: 1279212 NR Description: methionine sulfoxide reductase
  misc_feature (55)..(259): NCBI GI NO: 18424492 NR Description: peptide methionine sulfoxide reductase
MPPLLTSPASLPSASPLLVSCIGALHRPGPFLHQRAAASVHFLAPHRKTRPPPAMSWLGKLGLSGLGGSPRASEASAALAQGPDEDQPAPGNEFAQFGAGCFWGVELAFQLVPGVTRTEVGYSQGNIHDPTYEDVCTGTTNHNEVVRVQYDPAACKYDDLLDTFWARHDPTTPNRQGNDVGTQYRSGIYYYNPEQEKAARESLEKQQKLLNRKIVTEIVPAKRFYRAEEYHQQYLEKGGRFGFGQSAAKGCNDPIRCYG

SEQ ID NO: 41237 - protein, 205 aa, Zea mays subsp. mays
  peptide (1)..(205): Ceres Seq. ID no. 12387958
  misc_feature (39)..(192): Pfam Name: Pfam Description:  Peptide methionine sulfoxide reductase
  misc_feature (1)..(205): NCBI GI NO: 37536896 NR Description: putative peptide methionine sulfoxide reductase
  misc_feature (1)..(205): NCBI GI NO: 12230349 NR Description: Peptide methionine sulfoxide reductase
  misc_feature (1)..(205): NCBI GI NO: 29469000 NR Description: peptide methionine sulfoxide reductase; cPMSR
  misc_feature (1)..(205): NCBI GI NO: 21593143 NR Description: protein-methionine-S-oxide reductase
  misc_feature (11)..(205): NCBI GI NO: 21592658 NR Description: peptide methionine sulfoxide reductase (msr)
  misc_feature (1)..(205): NCBI GI NO: 15234942 NR Description: protein-methionine-S-oxide reductase
  misc_feature (1)..(205): NCBI GI NO: 15146324 NR Description: AT4g25130/F13M23_270 [Arabidopsis thaliana]
  misc_feature (11)..(205): NCBI GI NO: 15240796 NR Description: peptide methionine sulfoxide reductase
  misc_feature (1)..(205): NCBI GI NO: 1279212 NR Description: methionine sulfoxide reductase
  misc_feature (1)..(205): NCBI GI NO: 18424492 NR Description: peptide methionine sulfoxide reductase
MSWLGKLGLSGLGGSPRASEASAALAQGPDEDQPAPGNEFAQFGAGCFWGVELAFQLVPGVTRTEVGYSQGNIHDPTYEDVCTGTTNHNEVVRVQYDPAACKYDDLLDTFWARHDPTTPNRQGNDVGTQYRSGIYYYNPEQEKAARESLEKQQKLLNRKIVTEIVPAKRFYRAEEYHQQYLEKGGRFGFGQSAAKGCNDPIRCYG

SEQ ID NO: 41238 - protein, 203 aa, Zea mays subsp. mays
  peptide (1)..(203): Ceres Seq. ID no. 12387959
  misc_feature (18)..(176): Pfam Name: Pfam Description:  Herpesvirus leader protein
ARDHYLEHPNRKKETRRQGLRGSAPDASAPHLTRLPPLRLPSPRLLYRRSPPPRPLPPPARRRLGPLPRAAQEDPTAPRDELAWEAGPERAWRQPARVGGVGSAGAGARRGPARAGERVRAIRRRLLLGRGARVPARAGSHPHGGRLQPGQHPRSDLRGRLHRHHKPQRGRPRAVRPGRLQVRRPPRHLLGAPRPHYSQPTGQ

SEQ ID NO: 41239 - DNA, 1755 bp, Zea mays subsp. mays
  misc_feature (1)..(1755): Ceres Seq. ID no. 12384370
gcacgagaccattacctagaacatcctaatcgaaaactctgtctccctcgtgctgccctcgccctccttttttttttagtttacccgccgtcccgcgcgccgccgtttcggttgctcggctagagggactagggagtgccagcgagtccatggcagcggcgagggcgtgcttcgtcgcgctggcgctggtggcggcgctcttcgtggccggatcggcggcagcggcggcggggaatgccggaggccgctcgcagctgacgctcaggcagcggcgccggcagctgctgcggcagcggcaggtgcgcagccacctcaagaggctcaacaaggcgccgctcgccaccatcgagagtccagacggagacatcatagactgcgtgcatatctccaaccagcccgccttggatcaccccttcctcaagaaccacaccgtccagatgcggcctgcataccacccggaaggtctgtacgacgacgagtccaaggttgcatcgcagcggaacgcgcagacgatcacccagatgtggcatcagaacggcaggtgccccgagggcacgataccgatcaggcggaccaaggaggaggacgtgctgagggccagctccgtcaggaggtatggcaagaagaagcgcaggagtgcccccaaccccatgtcggttgaccctgacatgctcaacgagagcggccaccagcacgccatagcgtacgtggaaggagacaagtactacggcgccaaggctaccatcaatgtgtggcagccgaagatcgagcaggccaatgagttcagcctgtcccagctctggatcctggggggctccttcggccaggacctcaacagcatcgaagcaggatggcaggttagcccagacctgtatggggacaacaacactaggctcttcacctactggactagcgatgcctaccaggcaacaggatgctacaacctgctgtgctcggggttcatccagataaacaaccagatcgccatgggcgccagcatcttccctatctccaactacggcggctcccagtatgacatcaacatcttggtctggaaggaccccaaggagggcaactggtggctgcagttcggcaacgactacgtcctggggtactggccgtcgttcctcttctcgtacctggcggacagtgcctccatgatcgagtggggcggcgaggtggtgaactcggagcccgacggcagccacaccagcacgcagatgggcagcggccacttccccgaggaagggttcggcaaggccagctacttcaggaacgtccaggtggtggactccaccaacaacctcaaggcgcccaggggcgtgggcaccttcaccgagcagtccagctgctacgacgtgcaggacggcagcaacgccgactggggcacatacttctactacggcgggcccgggaagaactcaaactgtccatagcccaagactgactgagctgagccgccgcctatcacactcactaccagagccgcctaaccttaacacacctcagctgtatcattcatgcatccggtcaattagtttatactgcctcagatttttaacttttttttcgttttgtttcgctctttcttgcttctacctaccccctagtttactgactcctaccctaggtgagtgagcgtgtgtgttgtagacatgtgagattgttctctctgcctcagagagagtgagatgaaggagagatgtcggtcgtctggttctagggaagagatgaggaggactagggggtaggtag

SEQ ID NO: 41240 - protein, 428 aa, Zea mays subsp. mays
  peptide (1)..(428): Ceres Seq. ID no. 12384371
  misc_feature (192)..(386): Pfam Name: Pfam Description:  Arabidopsis proteins of unknown function
  misc_feature (2)..(428): NCBI GI NO: 34393554 NR Description: putative carboxyl-terminal proteinase
  misc_feature (50)..(428): NCBI GI NO: 34393299 NR Description: putative DD1A protein
  misc_feature (54)..(428): NCBI GI NO: 30103019 NR Description: unknown protein
  misc_feature (47)..(428): NCBI GI NO: 18400044 NR Description: expressed protein; protein id: At3g13510
  misc_feature (47)..(428): NCBI GI NO: 21593294 NR Description: putative carboxyl-terminal peptidase
  misc_feature (42)..(428): NCBI GI NO: 15222707 NR Description: unknown protein; protein id: At1g55360.1
  misc_feature (42)..(428): NCBI GI NO: 27311623 NR Description: unknown protein [Arabidopsis thaliana]
  misc_feature (42)..(427): NCBI GI NO: 15241244 NR Description: putative protein; protein id: At5g56530
  misc_feature (50)..(428): NCBI GI NO: 18406483 NR Description: expressed protein; protein id: At2g44210
  misc_feature (41)..(427): NCBI GI NO: 15238835 NR Description: putative protein; protein id: At5g18460
MAAARACFVALALVAALFVAGSAAAAAGNAGGRSQLTLRQRRRQLLRQRQVRSHLKRLNKAPLATIESPDGDIIDCVHISNQPALDHPFLKNHTVQMRPAYHPEGLYDDESKVASQRNAQTITQMWHQNGRCPEGTIPIRRTKEEDVLRASSVRRYGKKKRRSAPNPMSVDPDMLNESGHQHAIAYVEGDKYYGAKATINVWQPKIEQANEFSLSQLWILGGSFGQDLNSIEAGWQVSPDLYGDNNTRLFTYWTSDAYQATGCYNLLCSGFIQINNQIAMGASIFPISNYGGSQYDINILVWKDPKEGNWWLQFGNDYVLGYWPSFLFSYLADSASMIEWGGEVVNSEPDGSHTSTQMGSGHFPEEGFGKASYFRNVQVVDSTNNLKAPRGVGTFTEQSSCYDVQDGSNADWGTYFYYGGPGKNSNCP

SEQ ID NO: 41241 - protein, 332 aa, Zea mays subsp. mays
  peptide (1)..(332): Ceres Seq. ID no. 12384372
  misc_feature (96)..(290): Pfam Name: Pfam Description:  Arabidopsis proteins of unknown function
  misc_feature (1)..(332): NCBI GI NO: 34393554 NR Description: putative carboxyl-terminal proteinase
  misc_feature (1)..(332): NCBI GI NO: 34393299 NR Description: putative DD1A protein
  misc_feature (1)..(332): NCBI GI NO: 30103019 NR Description: unknown protein
  misc_feature (1)..(332): NCBI GI NO: 18400044 NR Description: expressed protein; protein id: At3g13510
  misc_feature (1)..(332): NCBI GI NO: 21593294 NR Description: putative carboxyl-terminal peptidase
  misc_feature (1)..(332): NCBI GI NO: 15222707 NR Description: unknown protein; protein id: At1g55360.1
  misc_feature (1)..(332): NCBI GI NO: 27311623 NR Description: unknown protein [Arabidopsis thaliana]
  misc_feature (1)..(331): NCBI GI NO: 15241244 NR Description: putative protein; protein id: At5g56530
  misc_feature (1)..(332): NCBI GI NO: 18406483 NR Description: expressed protein; protein id: At2g44210
  misc_feature (1)..(331): NCBI GI NO: 15238835 NR Description: putative protein; protein id: At5g18460
MRPAYHPEGLYDDESKVASQRNAQTITQMWHQNGRCPEGTIPIRRTKEEDVLRASSVRRYGKKKRRSAPNPMSVDPDMLNESGHQHAIAYVEGDKYYGAKATINVWQPKIEQANEFSLSQLWILGGSFGQDLNSIEAGWQVSPDLYGDNNTRLFTYWTSDAYQATGCYNLLCSGFIQINNQIAMGASIFPISNYGGSQYDINILVWKDPKEGNWWLQFGNDYVLGYWPSFLFSYLADSASMIEWGGEVVNSEPDGSHTSTQMGSGHFPEEGFGKASYFRNVQVVDSTNNLKAPRGVGTFTEQSSCYDVQDGSNADWGTYFYYGGPGKNSNCP

SEQ ID NO: 41242 - protein, 304 aa, Zea mays subsp. mays
  peptide (1)..(304): Ceres Seq. ID no. 12384373
  misc_feature (68)..(262): Pfam Name: Pfam Description:  Arabidopsis proteins of unknown function
  misc_feature (1)..(304): NCBI GI NO: 34393554 NR Description: putative carboxyl-terminal proteinase
  misc_feature (1)..(304): NCBI GI NO: 34393299 NR Description: putative DD1A protein
  misc_feature (1)..(304): NCBI GI NO: 30103019 NR Description: unknown protein
  misc_feature (1)..(304): NCBI GI NO: 18400044 NR Description: expressed protein; protein id: At3g13510
  misc_feature (1)..(304): NCBI GI NO: 21593294 NR Description: putative carboxyl-terminal peptidase
  misc_feature (1)..(304): NCBI GI NO: 15222707 NR Description: unknown protein; protein id: At1g55360.1
  misc_feature (1)..(304): NCBI GI NO: 27311623 NR Description: unknown protein [Arabidopsis thaliana]
  misc_feature (1)..(303): NCBI GI NO: 15241244 NR Description: putative protein; protein id: At5g56530
  misc_feature (1)..(304): NCBI GI NO: 18406483 NR Description: expressed protein; protein id: At2g44210
  misc_feature (1)..(303): NCBI GI NO: 15238835 NR Description: putative protein; protein id: At5g18460
MWHQNGRCPEGTIPIRRTKEEDVLRASSVRRYGKKKRRSAPNPMSVDPDMLNESGHQHAIAYVEGDKYYGAKATINVWQPKIEQANEFSLSQLWILGGSFGQDLNSIEAGWQVSPDLYGDNNTRLFTYWTSDAYQATGCYNLLCSGFIQINNQIAMGASIFPISNYGGSQYDINILVWKDPKEGNWWLQFGNDYVLGYWPSFLFSYLADSASMIEWGGEVVNSEPDGSHTSTQMGSGHFPEEGFGKASYFRNVQVVDSTNNLKAPRGVGTFTEQSSCYDVQDGSNADWGTYFYYGGPGKNSNCP

SEQ ID NO: 41243 - DNA, 1214 bp, Zea mays subsp. mays
  misc_feature (1)..(1214): Ceres Seq. ID no. 12359952
agcggcggcttggccacctctgagcctcaagccctcaacctccctcttcggcgcgtaacgtcagtcctcaggtattggcagcataaagtgttagatttgtccttgattgaggtaccccttcaaaggtcaagatgttgtggcgcgcagtacgcagtatggatgtaataatgcattcttcgagtttccttcttccgaaactgtatcaacctgtcaacaaaccagtcaagaactatgctttagttgttctaaaccagcatcttccacgattcatgcctcgactctgggatcatgcaaacttgaagatctgcgctgatggaggagctaatcatatttttgatgagatgtatcagataaccaatgatgaagacaaaaaaagcaccagaaataagtatgttccagaaataattgaaggggacatggattctataagacctgaagtaaaactgttctactctagtcagggatccaaaatttctgataagtcacataaccaggagacaacagatctacacaaatgtatttctcgaatccatcattgtacgcctgatgatgaaaaaccaaatctctgtgtacttgttactggagcactaggtggaaggtttgatcacgaggcggcaaatatcaatgttctgtatctgttttcggacatgaggattgtcctcctatcagacgattgcttgatccgacttcttccgagaacacatcgccatgagctttatattgagtcgtctgttgaaggaccccattgtgggcttttccctgttggagcaccatcaacaagcacaacaactactggcctgaaatggaatctaagtgaatcaaagatgagatttgggagcatgataagcacatccaacattgtgcagtcggagaaagtaactgtagaatctgatgcagatctcttgtggacaatttctctgcgaaatctgacataagcagttcctagtttgttatcttttttcttctctttcctgtcaagtggcaaccaagctcttgtacagccacttttgtgtttatgagttgtgtgtctggtaaataaataccatctgatgacaaatcgatgaggtctcatcattagacaggatgtctaccacgatcttgaactgctgatgaattatgtgaataacacgagcaggcatgatggttgtatcctctctagttgtataactgtattgttgtacttgcaacggggtttcttgtataaaattgttctc

SEQ ID NO: 41244 - protein, 267 aa, Zea mays subsp. mays
  peptide (1)..(267): Ceres Seq. ID no. 12359953
  misc_feature (40)..(180): Pfam Name: Pfam Description:  Thiamin pyrophosphokinase, catalytic domain
  misc_feature (110)..(267): NCBI GI NO: 34915046 NR Description: putative thiamin pyrophosphokinase
  misc_feature (9)..(86): NCBI GI NO: 34915046 NR Description: putative thiamin pyrophosphokinase
  misc_feature (8)..(264): NCBI GI NO: 30678415 NR Description: thiamin pyrophosphokinase -related
  misc_feature (9)..(264): NCBI GI NO: 18379026 NR Description: thiamin pyrophosphokinase, putative
  misc_feature (8)..(264): NCBI GI NO: 30689827 NR Description: thiamin pyrophosphokinase -related
  misc_feature (9)..(264): NCBI GI NO: 7488367 NR Description: probable thiamin pyrophosphokinase At2g44750
  misc_feature (8)..(264): NCBI GI NO: 18406621 NR Description: putative thiamin pyrophosphokinase
  misc_feature (14)..(265): NCBI GI NO: 34907130 NR Description: putative thiamine pyrophosphokinase
  misc_feature (80)..(264): NCBI GI NO: 30678410 NR Description: thiamin pyrophosphokinase -related
  misc_feature (14)..(265): NCBI GI NO: 14278354 NR Description: Chain A
MLWRAVRSMDVIMHSSSFLLPKLYQPVNKPVKNYALVVLNQHLPRFMPRLWDHANLKICADGGANHIFDEMYQITNDEDKKSTRNKYVPEIIEGDMDSIRPEVKLFYSSQGSKISDKSHNQETTDLHKCISRIHHCTPDDEKPNLCVLVTGALGGRFDHEAANINVLYLFSDMRIVLLSDDCLIRLLPRTHRHELYIESSVEGPHCGLFPVGAPSTSTTTTGLKWNLSESKMRFGSMISTSNIVQSEKVTVESDADLLWTISLRNLT

SEQ ID NO: 41245 - protein, 259 aa, Zea mays subsp. mays
  peptide (1)..(259): Ceres Seq. ID no. 12359954
  misc_feature (32)..(172): Pfam Name: Pfam Description:  Thiamin pyrophosphokinase, catalytic domain
  misc_feature (102)..(259): NCBI GI NO: 34915046 NR Description: putative thiamin pyrophosphokinase
  misc_feature (1)..(78): NCBI GI NO: 34915046 NR Description: putative thiamin pyrophosphokinase
  misc_feature (1)..(256): NCBI GI NO: 30678415 NR Description: thiamin pyrophosphokinase -related
  misc_feature (1)..(256): NCBI GI NO: 18379026 NR Description: thiamin pyrophosphokinase, putative
  misc_feature (1)..(256): NCBI GI NO: 30689827 NR Description: thiamin pyrophosphokinase -related
  misc_feature (1)..(256): NCBI GI NO: 7488367 NR Description: probable thiamin pyrophosphokinase At2g44750
  misc_feature (1)..(256): NCBI GI NO: 18406621 NR Description: putative thiamin pyrophosphokinase
  misc_feature (6)..(257): NCBI GI NO: 34907130 NR Description: putative thiamine pyrophosphokinase
  misc_feature (72)..(256): NCBI GI NO: 30678410 NR Description: thiamin pyrophosphokinase -related
  misc_feature (6)..(257): NCBI GI NO: 14278354 NR Description: Chain A
MDVIMHSSSFLLPKLYQPVNKPVKNYALVVLNQHLPRFMPRLWDHANLKICADGGANHIFDEMYQITNDEDKKSTRNKYVPEIIEGDMDSIRPEVKLFYSSQGSKISDKSHNQETTDLHKCISRIHHCTPDDEKPNLCVLVTGALGGRFDHEAANINVLYLFSDMRIVLLSDDCLIRLLPRTHRHELYIESSVEGPHCGLFPVGAPSTSTTTTGLKWNLSESKMRFGSMISTSNIVQSEKVTVESDADLLWTISLRNLT

SEQ ID NO: 41246 - protein, 255 aa, Zea mays subsp. mays
  peptide (1)..(255): Ceres Seq. ID no. 12359955
  misc_feature (28)..(168): Pfam Name: Pfam Description:  Thiamin pyrophosphokinase, catalytic domain
  misc_feature (98)..(255): NCBI GI NO: 34915046 NR Description: putative thiamin pyrophosphokinase
  misc_feature (1)..(74): NCBI GI NO: 34915046 NR Description: putative thiamin pyrophosphokinase
  misc_feature (1)..(252): NCBI GI NO: 30678415 NR Description: thiamin pyrophosphokinase -related
  misc_feature (1)..(252): NCBI GI NO: 18379026 NR Description: thiamin pyrophosphokinase, putative
  misc_feature (1)..(252): NCBI GI NO: 30689827 NR Description: thiamin pyrophosphokinase -related
  misc_feature (1)..(252): NCBI GI NO: 7488367 NR Description: probable thiamin pyrophosphokinase At2g44750
  misc_feature (1)..(252): NCBI GI NO: 18406621 NR Description: putative thiamin pyrophosphokinase
  misc_feature (2)..(253): NCBI GI NO: 34907130 NR Description: putative thiamine pyrophosphokinase
  misc_feature (68)..(252): NCBI GI NO: 30678410 NR Description: thiamin pyrophosphokinase -related
  misc_feature (2)..(253): NCBI GI NO: 14278354 NR Description: Chain A
MHSSSFLLPKLYQPVNKPVKNYALVVLNQHLPRFMPRLWDHANLKICADGGANHIFDEMYQITNDEDKKSTRNKYVPEIIEGDMDSIRPEVKLFYSSQGSKISDKSHNQETTDLHKCISRIHHCTPDDEKPNLCVLVTGALGGRFDHEAANINVLYLFSDMRIVLLSDDCLIRLLPRTHRHELYIESSVEGPHCGLFPVGAPSTSTTTTGLKWNLSESKMRFGSMISTSNIVQSEKVTVESDADLLWTISLRNLT

SEQ ID NO: 41247 - DNA, 2673 bp, Zea mays subsp. mays
  misc_feature (1)..(2673): Ceres Seq. ID no. 12375740
gcacgagaccattacctagaacatcctaatcgaaaagtaaacctagctgctctacctacccgcacccccaccccgtggagagcaagtgcagccatggcggcggatcgggagaaggagcgcgaggcggagctggagggcgccatgtacactaactgcctactcctcggcctcgatcccgcggtcctcggctctccctcttcccccgccggccgcgtgggcctatttcgtcactccaacccccgccttggcgagcaactcctctacttccttctctcctcgctccgcggccccgcgcagtccgcgaaggattttgacaaggtctggccaatcttcgactccgctcagtccagggagttcaggaagatcgtgcaagggatcatcagcgagctggaacagcatggggcactgcctcggagcaattctagggtctcgtcacttgccacatgctgcggaccgagatttgttgagcttttgtggcaactatctgtacatgccctgagagaagtccacaagagaacatttgcagctgatgttgtatcaaatccactacctgcagcactaacagatgtttcttatcttcatgctgcttctttactcccagtaaccaaggcaagaatagctctggagaggcgtaaatttcttaaaaatgcaaacatagctgttcagaggcaaatgacatggtcaaatttggcccatgagatgacagctgagttccgaagtctatgtgctgaagaggcttatttgcaacaagagttagagaaactacaagatatgagaaacaaagcaaaactggaaggcgaactctgggacgaacggctctcaggctcatctgggcagaactctcatttggtttctaaggcaactcgtctttgggaatcaatattggctcgcaaaggccagcacgaggttttagcttctggaccaattgaagatcttatagcacatcgggagcacagataccggatatcaggatcacagttactagcagcaatggatatgagttcaagtgttccacattctgagttactatcatctaaagctggtgaaacttctataattttggagaagcaggaagaattttctcagctattccaagaaaaggaagaagcccttacaaggtcagatgataggaatggacgtactcagcaaactgtttatgtagctgaaattcttcgccgctggacccatgctttacaacgtattcataaacaatctcttcatttggccaaagcgaatgatggagaggggcctgaattactgaggagtgcatccagcggagaggccagtactcattctgattcgttaactgcaacattagctgaacatcgccagcatttagtcagtatacagggtctaattaatcaactcaaggaggctattccagcaatgcagcagtctatagacgaactctcagaagaagtgaatagtgtatctattaactcaatggaccaattgaactcgaggctgccactgccagtacaaattgcagggtttggaacatcagaagaaagcagcagtgaagtttcggagatcaattctaagctctcttctacacacttggataagcctgggggcagtcctgctctaaagctaccaccattatttagtctgactccaagttcttctggaaaaggaatacagacacaaaaacggagtgcattggctcgtcaacgtagccaggacatcacatcagaacagaaaacgcttaccatcccctcaactaaggatcaaatgaatggttcaatgcacgaaaatgatgactattctgctcatgacattagacgttctgttcgtgaagctgctttatctaagccattgaagaatacagagagaccacaagataaaaatagtgatgatggttcggaacacttctttattccgctgtcaattagtgctgcgaagaaggaaatggattcggtggcaaatcgatgtaaccaaagattaggtttgtcacctcagatgaagttcccaaagagcacaagctacaatgcagataccccaatcaacaaaagtccaattctgttaagtgaactcaatggacatgattcgatcagtgccatgagtttccttgacccggctggtggtctggcacatcagtcctttatcactgatgatgctctggatcaagtattctctcctctattgatggaatcttcgttgttccatgatgcagatgaggatctacttgcacccttgtcagagactgatgcagcattaatggaatattaagcttcacatgtgcactatgtaatattttgaccactgcagacgcagcctggaggttattgtggcttatgtttgtcttattgactattcggctagttgcttgcgagttgcaaccatgttgagatacagatgcttcatcagaatttgtggggtatatgttgactattgatgcggggagaggtgatattgatgctgttttttccccttctggacaaggctctataggtgccggcgttgtaccaactgtagtggacgcaataggaaagcccaatcttgtatatttagttactatacatcagcagtatttgtgctgtaatactttttcgaattgctgaaatatgtgtttttctgctagttgcgtcctcctgagttttctcagtttcagtgtacgaaattgcaaatcacgaatctaatgaggttaagccaacggggactgtgttcagagtt

SEQ ID NO: 41248 - protein, 742 aa, Zea mays subsp. mays
  peptide (1)..(742): Ceres Seq. ID no. 12375741
  misc_feature (32)..(740): NCBI GI NO: 9758101 NR Description: gene_id:MNF13.29~unknown protein
  misc_feature (32)..(477): NCBI GI NO: 18422020 NR Description: putative protein; protein id: At5g40740
  misc_feature (268)..(742): NCBI GI NO: 9758101 NR Description: gene_id:MNF13.29~unknown protein
  misc_feature (268)..(742): NCBI GI NO: 18422020 NR Description: putative protein; protein id: At5g40740
ARDHYLEHPNRKVNLAALPTRTPTPWRASAAMAADREKEREAELEGAMYTNCLLLGLDPAVLGSPSSPAGRVGLFRHSNPRLGEQLLYFLLSSLRGPAQSAKDFDKVWPIFDSAQSREFRKIVQGIISELEQHGALPRSNSRVSSLATCCGPRFVELLWQLSVHALREVHKRTFAADVVSNPLPAALTDVSYLHAASLLPVTKARIALERRKFLKNANIAVQRQMTWSNLAHEMTAEFRSLCAEEAYLQQELEKLQDMRNKAKLEGELWDERLSGSSGQNSHLVSKATRLWESILARKGQHEVLASGPIEDLIAHREHRYRISGSQLLAAMDMSSSVPHSELLSSKAGETSIILEKQEEFSQLFQEKEEALTRSDDRNGRTQQTVYVAEILRRWTHALQRIHKQSLHLAKANDGEGPELLRSASSGEASTHSDSLTATLAEHRQHLVSIQGLINQLKEAIPAMQQSIDELSEEVNSVSINSMDQLNSRLPLPVQIAGFGTSEESSSEVSEINSKLSSTHLDKPGGSPALKLPPLFSLTPSSSGKGIQTQKRSALARQRSQDITSEQKTLTIPSTKDQMNGSMHENDDYSAHDIRRSVREAALSKPLKNTERPQDKNSDDGSEHFFIPLSISAAKKEMDSVANRCNQRLGLSPQMKFPKSTSYNADTPINKSPILLSELNGHDSISAMSFLDPAGGLAHQSFITDDALDQVFSPLLMESSLFHDADEDLLAPLSETDAALMEY

SEQ ID NO: 41249 - protein, 711 aa, Zea mays subsp. mays
  peptide (1)..(711): Ceres Seq. ID no. 12375742
  misc_feature (1)..(709): NCBI GI NO: 9758101 NR Description: gene_id:MNF13.29~unknown protein
  misc_feature (1)..(446): NCBI GI NO: 18422020 NR Description: putative protein; protein id: At5g40740
  misc_feature (237)..(711): NCBI GI NO: 9758101 NR Description: gene_id:MNF13.29~unknown protein
  misc_feature (237)..(711): NCBI GI NO: 18422020 NR Description: putative protein; protein id: At5g40740
MAADREKEREAELEGAMYTNCLLLGLDPAVLGSPSSPAGRVGLFRHSNPRLGEQLLYFLLSSLRGPAQSAKDFDKVWPIFDSAQSREFRKIVQGIISELEQHGALPRSNSRVSSLATCCGPRFVELLWQLSVHALREVHKRTFAADVVSNPLPAALTDVSYLHAASLLPVTKARIALERRKFLKNANIAVQRQMTWSNLAHEMTAEFRSLCAEEAYLQQELEKLQDMRNKAKLEGELWDERLSGSSGQNSHLVSKATRLWESILARKGQHEVLASGPIEDLIAHREHRYRISGSQLLAAMDMSSSVPHSELLSSKAGETSIILEKQEEFSQLFQEKEEALTRSDDRNGRTQQTVYVAEILRRWTHALQRIHKQSLHLAKANDGEGPELLRSASSGEASTHSDSLTATLAEHRQHLVSIQGLINQLKEAIPAMQQSIDELSEEVNSVSINSMDQLNSRLPLPVQIAGFGTSEESSSEVSEINSKLSSTHLDKPGGSPALKLPPLFSLTPSSSGKGIQTQKRSALARQRSQDITSEQKTLTIPSTKDQMNGSMHENDDYSAHDIRRSVREAALSKPLKNTERPQDKNSDDGSEHFFIPLSISAAKKEMDSVANRCNQRLGLSPQMKFPKSTSYNADTPINKSPILLSELNGHDSISAMSFLDPAGGLAHQSFITDDALDQVFSPLLMESSLFHDADEDLLAPLSETDAALMEY

SEQ ID NO: 41250 - protein, 695 aa, Zea mays subsp. mays
  peptide (1)..(695): Ceres Seq. ID no. 12375743
  misc_feature (1)..(693): NCBI GI NO: 9758101 NR Description: gene_id:MNF13.29~unknown protein
  misc_feature (1)..(430): NCBI GI NO: 18422020 NR Description: putative protein; protein id: At5g40740
  misc_feature (221)..(695): NCBI GI NO: 9758101 NR Description: gene_id:MNF13.29~unknown protein
  misc_feature (221)..(695): NCBI GI NO: 18422020 NR Description: putative protein; protein id: At5g40740
MYTNCLLLGLDPAVLGSPSSPAGRVGLFRHSNPRLGEQLLYFLLSSLRGPAQSAKDFDKVWPIFDSAQSREFRKIVQGIISELEQHGALPRSNSRVSSLATCCGPRFVELLWQLSVHALREVHKRTFAADVVSNPLPAALTDVSYLHAASLLPVTKARIALERRKFLKNANIAVQRQMTWSNLAHEMTAEFRSLCAEEAYLQQELEKLQDMRNKAKLEGELWDERLSGSSGQNSHLVSKATRLWESILARKGQHEVLASGPIEDLIAHREHRYRISGSQLLAAMDMSSSVPHSELLSSKAGETSIILEKQEEFSQLFQEKEEALTRSDDRNGRTQQTVYVAEILRRWTHALQRIHKQSLHLAKANDGEGPELLRSASSGEASTHSDSLTATLAEHRQHLVSIQGLINQLKEAIPAMQQSIDELSEEVNSVSINSMDQLNSRLPLPVQIAGFGTSEESSSEVSEINSKLSSTHLDKPGGSPALKLPPLFSLTPSSSGKGIQTQKRSALARQRSQDITSEQKTLTIPSTKDQMNGSMHENDDYSAHDIRRSVREAALSKPLKNTERPQDKNSDDGSEHFFIPLSISAAKKEMDSVANRCNQRLGLSPQMKFPKSTSYNADTPINKSPILLSELNGHDSISAMSFLDPAGGLAHQSFITDDALDQVFSPLLMESSLFHDADEDLLAPLSETDAALMEY

SEQ ID NO: 41251 - DNA, 448 bp, Zea mays subsp. mays
  misc_feature (1)..(448): Ceres Seq. ID no. 4614514
tttgagaagcttgggccaagcctatatgactttctgcgaaagaatagctaccgttcatttcctattgaccttgtccgagaatttgccagacaaatattagagtctgttgcatttatgcatgacttgcgacttattcacacggatctgaagccagagaacattctccttgtttcatcagagtctatcagggtgcctgattataaggtttctatacgaccaccaaaggatggttctttctttaagaaccttccaaaatctagtgctatcaagctgattgattttgggagtacaactttcgagagccaagaccacaattatgtggtgtcgacaagacattatcgtgcaccagaagttatccttggtcttgggtggaactatccatgcgacttgtggagtgtgggttgcattttagttgagctttgttcgggggaagctctctttcaaacac

SEQ ID NO: 41252 - protein, 149 aa, Zea mays subsp. mays
  peptide (1)..(149): Ceres Seq. ID no. 4614515
  misc_feature (1)..(148): Pfam Name: Pfam Description:  Protein kinase domain
  misc_feature (1)..(148): NCBI GI NO: 34908100 NR Description: putative protein kinase AFC1
  misc_feature (1)..(148): NCBI GI NO: 601787 NR Description: protein kinase
  misc_feature (1)..(148): NCBI GI NO: 15231839 NR Description: protein kinase (AME2/AFC1); protein id:At3g53570
  misc_feature (1)..(148): NCBI GI NO: 30693861 NR Description: protein kinase (AME2/AFC1) [Arabidopsis thaliana]
  misc_feature (1)..(148): NCBI GI NO: 7489189 NR Description: protein kinase PK12 (EC 2
  misc_feature (1)..(148): NCBI GI NO: 7211773 NR Description: protein kinase MK5 [Mesembryanthemum crystallinum]
  misc_feature (1)..(148): NCBI GI NO: 15233948 NR Description: protein kinase (AFC2); protein id: At4g24740
  misc_feature (1)..(148): NCBI GI NO: 34912246 NR Description: putative protein kinase AFC3
  misc_feature (1)..(148): NCBI GI NO: 601791 NR Description: protein kinase
  misc_feature (1)..(148): NCBI GI NO: 15233872 NR Description: protein kinase AME3; protein id: At4g32660
FEKLGPSLYDFLRKNSYRSFPIDLVREFARQILESVAFMHDLRLIHTDLKPENILLVSSESIRVPDYKVSIRPPKDGSFFKNLPKSSAIKLIDFGSTTFESQDHNYVVSTRHYRAPEVILGLGWNYPCDLWSVGCILVELCSGEALFQT

SEQ ID NO: 41253 - protein, 111 aa, Zea mays subsp. mays
  peptide (1)..(111): Ceres Seq. ID no. 4614516
  misc_feature (1)..(110): Pfam Name: Pfam Description:  Protein kinase domain
  misc_feature (1)..(110): NCBI GI NO: 34908100 NR Description: putative protein kinase AFC1
  misc_feature (1)..(110): NCBI GI NO: 601787 NR Description: protein kinase
  misc_feature (1)..(110): NCBI GI NO: 15231839 NR Description: protein kinase (AME2/AFC1); protein id:At3g53570
  misc_feature (1)..(110): NCBI GI NO: 30693861 NR Description: protein kinase (AME2/AFC1) [Arabidopsis thaliana]
  misc_feature (1)..(110): NCBI GI NO: 7489189 NR Description: protein kinase PK12 (EC 2
  misc_feature (1)..(110): NCBI GI NO: 7211773 NR Description: protein kinase MK5 [Mesembryanthemum crystallinum]
  misc_feature (1)..(110): NCBI GI NO: 15233948 NR Description: protein kinase (AFC2); protein id: At4g24740
  misc_feature (1)..(110): NCBI GI NO: 34912246 NR Description: putative protein kinase AFC3
  misc_feature (1)..(110): NCBI GI NO: 601791 NR Description: protein kinase
  misc_feature (1)..(110): NCBI GI NO: 15233872 NR Description: protein kinase AME3; protein id: At4g32660
MHDLRLIHTDLKPENILLVSSESIRVPDYKVSIRPPKDGSFFKNLPKSSAIKLIDFGSTTFESQDHNYVVSTRHYRAPEVILGLGWNYPCDLWSVGCILVELCSGEALFQT

SEQ ID NO: 41254 - DNA, 1621 bp, Zea mays subsp. mays
  misc_feature (1)..(1621): Ceres Seq. ID no. 12391606
aggctctgggtctcgcatcacgatcagatccaatccaaggccgcgccccagcccggcggatggattccgccgccgtggccatcgtgacggtgccgttcccggcgcagggccacctgaaccagctgctgcacctgtccctgctcctggcatcgcgggggcttcctgtccacttcgtcgcgccggagccgcacctccgggaggcccgcgcgcgcctgcacggctgggggcccgaccccgcgtcggtgtgcttccgcgcgctggacgtgcccgcgcacgactccccctccccggacccatcctccccgttcccggcgcacatgcagcccctgttcgaggccttctgcaccggcgcgcgggcctcgctagccgcgctcctggcggagctggccgcgtcgcaccgccgcgtcgtcgtcctctacgaccgcatggcggccttcgcggcggccgaggccgcgcgcttacccaacgccgaggccctcggcgtgcactgcctcgccgcctcctacaacgtcgggtgggcggacccggggcacgccctcctgcgccgccacggcctcgtgttccacccgcccgacgcttgcgccacgccggagttcgtcgcgctcgccaggcggatgggccaggagcgccggcgcgcgcccggagccggcatggtcgtcaacacctgccgcgcgctcgagggcgacttcctcgacgcactccgggggatcccgtcctccgacggcccaaggctgttcgccgtcgggcctctcagcccggtgctccccctccccggcgcgagcgggactcggcacgagtgcctgggctggctcgacgcgcagccgccctcgtcggtgctctacgtgtcgttcggtacgacgtcgtcgctccgcccggagcaggtgcgcgagctggccgccgcgctgcgggacagcggggcgcgcttcgtgtgggcgctgcgggacgccgaccgcgcgggcatgcgcggcggagagggggatactacgaccgaggccctccacgccgccgcggcgtccgagctcggccccgacggcgctggcgtggtggtcaccgggtgggcgccgcagctggagatcctggcgcacggcgccaccgcggcgttcatgagccactgcggctggaactccaccgtggagagcatcagccacgggaagcccatcctggcgtggcccatgcatagcgaccagccctgggacgccgagctcgtgtgcaagtacctccgcgccggcgtcctggtgcgcccgtgggagcggcgccatgacgtgacccccgcggccgacatccgcgacgctatcgacagggtcatggcctcggaggaaggggctgagatccggcggcgggccggggcgctcggggaggccgttcgcggcgccgtggccgagggcgggtcgtctaggcaggacctggaggagctcgtcgcgtacgtgacgaggtgattccgtcgcgatggcccatgcggcgactgtgccgcgtggcggcgctgctgcctgcattaacgatttgtttccatggactatattagttgaaatgaaatccgaaggttttaggccaggctatggtttcatttgagggttggccaggccatcttcagtagtctatctatctattttataaacttgtg

SEQ ID NO: 41255 - protein, 477 aa, Zea mays subsp. mays
  peptide (1)..(477): Ceres Seq. ID no. 12391607
  misc_feature (22)..(477): NCBI GI NO: 34899110 NR Description: putative cis-zeatin O-glucosyltransferase
  misc_feature (24)..(477): NCBI GI NO: 14091010 NR Description: cis-zeatin O-glucosyltransferase [Zea mays]
  misc_feature (24)..(477): NCBI GI NO: 18568243 NR Description: putative cis-zeatin O-glucosyltransferase
  misc_feature (24)..(477): NCBI GI NO: 19743738 NR Description: cis-zeatin O-glucosyltransferase 2 [Zea mays]
  misc_feature (24)..(477): NCBI GI NO: 38345593 NR Description: OSJNBb0012E24.11
  misc_feature (24)..(477): NCBI GI NO: 38345594 NR Description: OSJNBb0012E24.12
  misc_feature (24)..(477): NCBI GI NO: 38345403 NR Description: OSJNBa0017B10.9
  misc_feature (25)..(477): NCBI GI NO: 38345407 NR Description: OSJNBa0017B10.13
  misc_feature (25)..(383): NCBI GI NO: 38345592 NR Description: OSJNBb0012E24.10
  misc_feature (25)..(477): NCBI GI NO: 20067054 NR Description: putative glucosyltransferase [Phaseolus lunatus]
ALGLASRSDPIQGRAPARRMDSAAVAIVTVPFPAQGHLNQLLHLSLLLASRGLPVHFVAPEPHLREARARLHGWGPDPASVCFRALDVPAHDSPSPDPSSPFPAHMQPLFEAFCTGARASLAALLAELAASHRRVVVLYDRMAAFAAAEAARLPNAEALGVHCLAASYNVGWADPGHALLRRHGLVFHPPDACATPEFVALARRMGQERRRAPGAGMVVNTCRALEGDFLDALRGIPSSDGPRLFAVGPLSPVLPLPGASGTRHECLGWLDAQPPSSVLYVSFGTTSSLRPEQVRELAAALRDSGARFVWALRDADRAGMRGGEGDTTTEALHAAAASELGPDGAGVVVTGWAPQLEILAHGATAAFMSHCGWNSTVESISHGKPILAWPMHSDQPWDAELVCKYLRAGVLVRPWERRHDVTPAADIRDAIDRVMASEEGAEIRRRAGALGEAVRGAVAEGGSSRQDLEELVAYVTR

SEQ ID NO: 41256 - protein, 458 aa, Zea mays subsp. mays
  peptide (1)..(458): Ceres Seq. ID no. 12391608
  misc_feature (3)..(458): NCBI GI NO: 34899110 NR Description: putative cis-zeatin O-glucosyltransferase
  misc_feature (5)..(458): NCBI GI NO: 14091010 NR Description: cis-zeatin O-glucosyltransferase [Zea mays]
  misc_feature (5)..(458): NCBI GI NO: 18568243 NR Description: putative cis-zeatin O-glucosyltransferase
  misc_feature (5)..(458): NCBI GI NO: 19743738 NR Description: cis-zeatin O-glucosyltransferase 2 [Zea mays]
  misc_feature (5)..(458): NCBI GI NO: 38345593 NR Description: OSJNBb0012E24.11
  misc_feature (5)..(458): NCBI GI NO: 38345594 NR Description: OSJNBb0012E24.12
  misc_feature (5)..(458): NCBI GI NO: 38345403 NR Description: OSJNBa0017B10.9
  misc_feature (6)..(458): NCBI GI NO: 38345407 NR Description: OSJNBa0017B10.13
  misc_feature (6)..(364): NCBI GI NO: 38345592 NR Description: OSJNBb0012E24.10
  misc_feature (6)..(458): NCBI GI NO: 20067054 NR Description: putative glucosyltransferase [Phaseolus lunatus]
MDSAAVAIVTVPFPAQGHLNQLLHLSLLLASRGLPVHFVAPEPHLREARARLHGWGPDPASVCFRALDVPAHDSPSPDPSSPFPAHMQPLFEAFCTGARASLAALLAELAASHRRVVVLYDRMAAFAAAEAARLPNAEALGVHCLAASYNVGWADPGHALLRRHGLVFHPPDACATPEFVALARRMGQERRRAPGAGMVVNTCRALEGDFLDALRGIPSSDGPRLFAVGPLSPVLPLPGASGTRHECLGWLDAQPPSSVLYVSFGTTSSLRPEQVRELAAALRDSGARFVWALRDADRAGMRGGEGDTTTEALHAAAASELGPDGAGVVVTGWAPQLEILAHGATAAFMSHCGWNSTVESISHGKPILAWPMHSDQPWDAELVCKYLRAGVLVRPWERRHDVTPAADIRDAIDRVMASEEGAEIRRRAGALGEAVRGAVAEGGSSRQDLEELVAYVTR

SEQ ID NO: 41257 - protein, 392 aa, Zea mays subsp. mays
  peptide (1)..(392): Ceres Seq. ID no. 12391609
  misc_feature (35)..(210): Pfam Name: Pfam Description:  Herpesvirus UL87 family
  misc_feature (1)..(392): NCBI GI NO: 23106243 NR Description: hypothetical protein [Azotobacter vinelandii]
  misc_feature (14)..(392): NCBI GI NO: 23106243 NR Description: hypothetical protein [Azotobacter vinelandii]
GSGSRITIRSNPRPRPSPADGFRRRGHRDGAVPGAGPPEPAAAPVPAPGIAGASCPLRRAGAAPPGGPRAPARLGARPRVGVLPRAGRARARLPLPGPILPVPGAHAAPVRGLLHRRAGLASRAPGGAGRVAPPRRRPLRPHGGLRGGRGRALTQRRGPRRALPRRLLQRRVGGPGARPPAPPRPRVPPARRLRHAGVRRARQADGPGAPARARSRHGRQHLPRARGRLPRRTPGDPVLRRPKAVRRRASQPGAPPPRRERDSARVPGLARRAAALVGALRVVRYDVVAPPGAGARAGRRAAGQRGALRVGAAGRRPRGHARRRGGYYDRGPPRRRGVRARPRRRWRGGHRVGAAAGDPGARRHRGVHEPLRLELHRGEHQPREAHPGVAHA

SEQ ID NO: 41258 - DNA, 2139 bp, Zea mays subsp. mays
  misc_feature (1)..(2139): Ceres Seq. ID no. 12419732
gcacgagaccattacctagaacatcctaatcaaaaaaacaaattggcactgctcgtcgccgacccctcctccctccccgcgtcccccgacaagccatccgcggccatgatcaccgcgctggacctctaccacgtgctgacggcggtggtgccgctgtacgtggccatgacgctggcgtacggctccgtccgctggtggcgcatcttcacgccggaccagtgctccgggatcaaccgcttcgtggcgctcttcgccgtgccgctcctctccttccacttcatctccaccaacgaccccttcgccatgaacctgcgcttcctggccgccgacacgctgcagaaggtggccgtcctcgcgctgctggcgctggcctcccgcggcctctcctccccgcgcgcgctcgggctcgactggagcatcacgctcttctccctctccacgctccccaacacgctcgtcatgggcatcccgctgctgcgaggcatgtacggccgcgtcgtcggccggcacgctcatggtccaggtcgtcgtcctccagtgcatcatctggtacacgctcatgctcttcctcttcgagtaccgcgccgcgcgcgcgctcgtcctcgaccagttccccgacggcgccgccgcgtccatcgtctccttccgcgtcgactccgacgtcgtctcgctcgccaggggggacgtcgagctcgaggccgagcccgacggcgtcgccggcgccggcgccgtctcctcccgcggcggggacgccgggcgggtgcgcgtcaccgtgcgcaagtccaccagctcgcgctccgaggccgcgtgctcgcactcgcactcccagaccatgcagccccgtgtgtccaacctctccggcgtggagatctactcgctgcagtcgtcgcgcaaccccaccccgcgcgggtccagcttcaaccacgccgacttcttcaacatcgtcggcgccgccgccaagggaggcggaggagcggcgggggacgaggagaagggcgcatgcggcggcggcggcggaggacactcgccgcagccgcaggccgtcgccgtgccggccaagaggaaggacctgcacatgctcgtctggagctccagcgcctcgcccgtgtccgagcgcgccgccgtgcacgtcttcggcgccggcggcgctgaccatgccgacgtcctcgccaaaggagcccaggcctacgacgagtacgggcgcgacgactacagcagcaggacgaagaacgggagcggcggcgcggacaagggcgggccgacgctgtcgaagctggggtccaactcgacggcgcagctgtaccccaaggacgacggcaaggggagggcggcggcggtggcgatgccgccggcgagcgtgatgacgcggctcatcctcatcatggtgtggaggaagctgatccggaaccccaacacctactccagcctcatcggcgtcgtctggtccctggtctcctacaggtggggcatcgagatgccagcgatcatcgcccggtcgatttcgatcctgtcggacgcgggtctcgggatggccatgttcagcctaggcctgttcatggcgctgcagccgaggatcatcgcgtgcgggaacaagctggcggccatcgcgatgggcgtccggttcgtcgcaggccccgcggtcatggccgccgcctccatcgccgtcggtctgcgcggcgtcctcctccacatcgccatcgtccaggctgctctgcctcaggggatcgtgccgttcgtgttcgccaaggagtacggcgttcatcccgacatcctgagcacagccgtgatcttcgggatgctcatcgctctgcccatcaccctggtctactacatcttgctggggctgtgagcctctctcgctcgcttcttcagcgtgcggaaggcgccatgctgtggtgtatcggccccacatgaaatttctgatgagcattagcgattactattagcttaggtagggaaacgaaagatagctccgacgacagcgatctattcagtgattcagtgagtgaggcattgcgatctgtcaaacatgctgacctgcggtcgaagaatcgatatatatatatcttatcttgcttcatgctgtcttaagataaacattatatatcttgtttcctttggagaaatattagcaatttt

SEQ ID NO: 41259 - protein, 444 aa, Zea mays subsp. mays
  peptide (1)..(444): Ceres Seq. ID no. 12419733
  misc_feature (1)..(174): Pfam Name: Pfam Description:  Auxin Efflux Carrier
  misc_feature (110)..(444): NCBI GI NO: 25956262 NR Description: PIN1-like auxin transport protein
  misc_feature (1)..(157): NCBI GI NO: 25956262 NR Description: PIN1-like auxin transport protein
  misc_feature (1)..(444): NCBI GI NO: 21435940 NR Description: PIN1-like auxin transport protein
  misc_feature (128)..(444): NCBI GI NO: 15219501 NR Description: auxin transporter splice variant b, putative
  misc_feature (1)..(174): NCBI GI NO: 15219501 NR Description: auxin transporter splice variant b, putative
  misc_feature (128)..(444): NCBI GI NO: 4151319 NR Description: putative auxin efflux carrier protein; AtPIN1
  misc_feature (1)..(174): NCBI GI NO: 4151319 NR Description: putative auxin efflux carrier protein; AtPIN1
  misc_feature (117)..(444): NCBI GI NO: 25986777 NR Description: auxin efflux carrier protein [Medicago truncatula]
  misc_feature (1)..(153): NCBI GI NO: 25986777 NR Description: auxin efflux carrier protein [Medicago truncatula]
  misc_feature (227)..(444): NCBI GI NO: 21435938 NR Description: PIN1-like auxin transport protein
MVQVVVLQCIIWYTLMLFLFEYRAARALVLDQFPDGAAASIVSFRVDSDVVSLARGDVELEAEPDGVAGAGAVSSRGGDAGRVRVTVRKSTSSRSEAACSHSHSQTMQPRVSNLSGVEIYSLQSSRNPTPRGSSFNHADFFNIVGAAAKGGGGAAGDEEKGACGGGGGGHSPQPQAVAVPAKRKDLHMLVWSSSASPVSERAAVHVFGAGGADHADVLAKGAQAYDEYGRDDYSSRTKNGSGGADKGGPTLSKLGSNSTAQLYPKDDGKGRAAAVAMPPASVMTRLILIMVWRKLIRNPNTYSSLIGVVWSLVSYRWGIEMPAIIARSISILSDAGLGMAMFSLGLFMALQPRIIACGNKLAAIAMGVRFVAGPAVMAAASIAVGLRGVLLHIAIVQAALPQGIVPFVFAKEYGVHPDILSTAVIFGMLIALPITLVYYILLGL

SEQ ID NO: 41260 - protein, 429 aa, Zea mays subsp. mays
  peptide (1)..(429): Ceres Seq. ID no. 12419734
  misc_feature (1)..(159): Pfam Name: Pfam Description:  Auxin Efflux Carrier
  misc_feature (95)..(429): NCBI GI NO: 25956262 NR Description: PIN1-like auxin transport protein
  misc_feature (1)..(142): NCBI GI NO: 25956262 NR Description: PIN1-like auxin transport protein
  misc_feature (1)..(429): NCBI GI NO: 21435940 NR Description: PIN1-like auxin transport protein
  misc_feature (113)..(429): NCBI GI NO: 15219501 NR Description: auxin transporter splice variant b, putative
  misc_feature (1)..(159): NCBI GI NO: 15219501 NR Description: auxin transporter splice variant b, putative
  misc_feature (113)..(429): NCBI GI NO: 4151319 NR Description: putative auxin efflux carrier protein; AtPIN1
  misc_feature (1)..(159): NCBI GI NO: 4151319 NR Description: putative auxin efflux carrier protein; AtPIN1
  misc_feature (102)..(429): NCBI GI NO: 25986777 NR Description: auxin efflux carrier protein [Medicago truncatula]
  misc_feature (1)..(138): NCBI GI NO: 25986777 NR Description: auxin efflux carrier protein [Medicago truncatula]
  misc_feature (212)..(429): NCBI GI NO: 21435938 NR Description: PIN1-like auxin transport protein
MLFLFEYRAARALVLDQFPDGAAASIVSFRVDSDVVSLARGDVELEAEPDGVAGAGAVSSRGGDAGRVRVTVRKSTSSRSEAACSHSHSQTMQPRVSNLSGVEIYSLQSSRNPTPRGSSFNHADFFNIVGAAAKGGGGAAGDEEKGACGGGGGGHSPQPQAVAVPAKRKDLHMLVWSSSASPVSERAAVHVFGAGGADHADVLAKGAQAYDEYGRDDYSSRTKNGSGGADKGGPTLSKLGSNSTAQLYPKDDGKGRAAAVAMPPASVMTRLILIMVWRKLIRNPNTYSSLIGVVWSLVSYRWGIEMPAIIARSISILSDAGLGMAMFSLGLFMALQPRIIACGNKLAAIAMGVRFVAGPAVMAAASIAVGLRGVLLHIAIVQAALPQGIVPFVFAKEYGVHPDILSTAVIFGMLIALPITLVYYILLGL

SEQ ID NO: 41261 - protein, 383 aa, Zea mays subsp. mays
  peptide (1)..(383): Ceres Seq. ID no. 12419735
  misc_feature (44)..(168): Pfam Name: Pfam Description:  Auxin Efflux Carrier
  misc_feature (36)..(168): NCBI GI NO: 25956262 NR Description: PIN1-like auxin transport protein
  misc_feature (36)..(168): NCBI GI NO: 21435940 NR Description: PIN1-like auxin transport protein
  misc_feature (36)..(168): NCBI GI NO: 15219501 NR Description: auxin transporter splice variant b, putative
  misc_feature (36)..(168): NCBI GI NO: 4151319 NR Description: putative auxin efflux carrier protein; AtPIN1
  misc_feature (36)..(168): NCBI GI NO: 25986777 NR Description: auxin efflux carrier protein [Medicago truncatula]
  misc_feature (36)..(168): NCBI GI NO: 21435938 NR Description: PIN1-like auxin transport protein
  misc_feature (36)..(168): NCBI GI NO: 18423936 NR Description:
  misc_feature (36)..(168): NCBI GI NO: 4322486 NR Description: root gravitropism control protein
  misc_feature (36)..(168): NCBI GI NO: 25986771 NR Description: auxin efflux carrier protein [Medicago truncatula]
  misc_feature (36)..(168): NCBI GI NO: 18379216 NR Description: putative auxin transport protein
ARDHYLEHPNQKNKLALLVADPSSLPASPDKPSAAMITALDLYHVLTAVVPLYVAMTLAYGSVRWWRIFTPDQCSGINRFVALFAVPLLSFHFISTNDPFAMNLRFLAADTLQKVAVLALLALASRGLSSPRALGLDWSITLFSLSTLPNTLVMGIPLLRGMYGRVVGRHAHGPGRRPPVHHLVHAHALPLRVPRRARARPRPVPRRRRRVHRLLPRRLRRRLARQGGRRARGRARRRRRRRRRLLPRRGRRAGARHRAQVHQLALRGRVLALALPDHAAPCVQPLRRGDLLAAVVAQPHPARVQLQPRRLLQHRRRRRQGRRRSGGGRGEGRMRRRRRRTLAAAAGRRRAGQEEGPAHARLELQRLARVRARRRARLRRRRR

SEQ ID NO: 41262 - DNA, 1239 bp, Zea mays subsp. mays
  misc_feature (1)..(1239): Ceres Seq. ID no. 12379487
  misc_feature (609)..(609): n is a, c, t, g, unknown, or other
gcacgagaccattacctagaacatcctaatcgaaaaactcacggtcggaatgagcgttcaccgtcacaatcactgaatcacacaagcacgaccacgcacacgcggtaaacacgcgcgcgctcaaacagttcgaaatggcgctcgccgccgccatcatcgtcgtcttcctgcttcctggccttctcctcacggcgatggcggccacgccgtaccctcacggccgcggcgccgacgctctcgtgggcgcgtccaagaagtacgagggcagctccaacctggtggacctccgctaccacatgtccccgtcctctccgccgcgccgctccgcctctacgtgctctggtacggccgatgggaccccgcgcaccaggtccccgtccgcgacttcctcctctccctctccgacacgtccctgccgcgcccctccgtcgccgactggtgggccaccgccgcgctctacgccgaccagaccctcgccaacgtcacctgccgcgtcgacctggccggggaagccgccgacgagtcggcctcgctgggccgctcgctctcccggctcgacatccagcgcgtgctcgcctctgcggtcgccgcgggccggctccctgccgncacccgcggcggcgcctaccttgttctcacggcgcccggcgtcggcgtccaggacttctgccgcgccgtatgcggcttccactacttcaccttcccgtcgctcgtgggccacacgctgccctacgcgtgggtcgggcacagcggcggccgctgcgccgacgtctgcgcgtacccgttcgcgctgtcgtcgtacatggcccggagcggcatggcggcgctgcggccgcccaacggcgacgcgggcgtcgacggcatggtcagcgtcatcgcgcacgagctggccgagctcgccacgaacccgctcgtcaacgcgtggtacgccggggaggaccccacggcgcccaccgagatcgccgacctgtgcgagggggtgtacggtacgggcggcggcggcgggtacgccgggaaggtgtcggtggacgcgcaggggaggagctggaatgtgaatgggaggaaggggaggaaattcttggtgcagtggctgtggagcccagaggctaaggcgtgcgtggggcccaatgccagtgactaggcttattggccactgctagcatgtaactaccatgtagtagtagtttattattctcagctttactttatattatattatatataaaaaactattatatg

SEQ ID NO: 41263 - protein, 306 aa, Zea mays subsp. mays
  peptide (1)..(306): Ceres Seq. ID no. 12379488
  misc_feature (11)..(262): Pfam Name: Pfam Description:  Equine herpesvirus glycoprotein gp2
  misc_feature (38)..(61): NCBI GI NO: 18398352 NR Description: expressed protein; protein id: At2g17230
  misc_feature (38)..(61): NCBI GI NO: 21594010 NR Description: unknown [Arabidopsis thaliana]
  misc_feature (3)..(57): NCBI GI NO: 16604527 NR Description: AT5g51550/K17N15_10 [Arabidopsis thaliana]
  misc_feature (3)..(57): NCBI GI NO: 15242118 NR Description: putative protein; protein id: At5g51550
  misc_feature (3)..(57): NCBI GI NO: 21592873 NR Description: unknown [Arabidopsis thaliana]
  misc_feature (6)..(60): NCBI GI NO: 18403760 NR Description: Expressed protein; protein id: At2g35150
  misc_feature (6)..(60): NCBI GI NO: 25408357 NR Description: hypothetical protein At2g35150
  misc_feature (56)..(299): NCBI GI NO: 11360318 NR Description: probable mucin DKFZp434C196.1 - human (fragment)
  misc_feature (56)..(295): NCBI GI NO: 11360318 NR Description: probable mucin DKFZp434C196.1 - human (fragment)
  misc_feature (56)..(278): NCBI GI NO: 7434728 NR Description: DNA-directed RNA polymerase (EC 2
  misc_feature (159)..(159): Xaa is any aa, unknown or other
MALAAAIIVVFLLPGLLLTAMAATPYPHGRGADALVGASKKYEGSSNLVDLRYHMSPSSPPRRSASTCSGTADGTPRTRSPSATSSSPSPTRPCRAPPSPTGGPPPRSTPTRPSPTSPAASTWPGKPPTSRPRWAARSPGSTSSACSPLRSPRAGSLPXPAAAPTLFSRRPASASRTSAAPYAASTTSPSRRSWATRCPTRGSGTAAAAAPTSARTRSRCRRTWPGAAWRRCGRPTATRASTAWSASSRTSWPSSPRTRSSTRGTPGRTPRRPPRSPTCARGCTVRAAAAGTPGRCRWTRRGGAGM

SEQ ID NO: 41264 - protein, 286 aa, Zea mays subsp. mays
  peptide (1)..(286): Ceres Seq. ID no. 12379489
  misc_feature (1)..(242): Pfam Name: Pfam Description:  Equine herpesvirus glycoprotein gp2
  misc_feature (18)..(41): NCBI GI NO: 18398352 NR Description: expressed protein; protein id: At2g17230
  misc_feature (18)..(41): NCBI GI NO: 21594010 NR Description: unknown [Arabidopsis thaliana]
  misc_feature (1)..(37): NCBI GI NO: 16604527 NR Description: AT5g51550/K17N15_10 [Arabidopsis thaliana]
  misc_feature (1)..(37): NCBI GI NO: 15242118 NR Description: putative protein; protein id: At5g51550
  misc_feature (1)..(37): NCBI GI NO: 21592873 NR Description: unknown [Arabidopsis thaliana]
  misc_feature (1)..(40): NCBI GI NO: 18403760 NR Description: Expressed protein; protein id: At2g35150
  misc_feature (1)..(40): NCBI GI NO: 25408357 NR Description: hypothetical protein At2g35150
  misc_feature (36)..(279): NCBI GI NO: 11360318 NR Description: probable mucin DKFZp434C196.1 - human (fragment)
  misc_feature (36)..(275): NCBI GI NO: 11360318 NR Description: probable mucin DKFZp434C196.1 - human (fragment)
  misc_feature (36)..(258): NCBI GI NO: 7434728 NR Description: DNA-directed RNA polymerase (EC 2
  misc_feature (139)..(139): Xaa is any aa, unknown or other
MAATPYPHGRGADALVGASKKYEGSSNLVDLRYHMSPSSPPRRSASTCSGTADGTPRTRSPSATSSSPSPTRPCRAPPSPTGGPPPRSTPTRPSPTSPAASTWPGKPPTSRPRWAARSPGSTSSACSPLRSPRAGSLPXPAAAPTLFSRRPASASRTSAAPYAASTTSPSRRSWATRCPTRGSGTAAAAAPTSARTRSRCRRTWPGAAWRRCGRPTATRASTAWSASSRTSWPSSPRTRSSTRGTPGRTPRRPPRSPTCARGCTVRAAAAGTPGRCRWTRRGGAGM

SEQ ID NO: 41265 - protein, 252 aa, Zea mays subsp. mays
  peptide (1)..(252): Ceres Seq. ID no. 12379490
  misc_feature (1)..(208): Pfam Name: Pfam Description:  Equine herpesvirus glycoprotein gp2
  misc_feature (2)..(245): NCBI GI NO: 11360318 NR Description: probable mucin DKFZp434C196.1 - human (fragment)
  misc_feature (2)..(241): NCBI GI NO: 11360318 NR Description: probable mucin DKFZp434C196.1 - human (fragment)
  misc_feature (2)..(224): NCBI GI NO: 7434728 NR Description: DNA-directed RNA polymerase (EC 2
  misc_feature (1)..(240): NCBI GI NO: 27375632 NR Description: blr0521 [Bradyrhizobium japonicum]
  misc_feature (2)..(224): NCBI GI NO: 99898 NR Description: DNA-directed RNA polymerase (EC 2
  misc_feature (1)..(224): NCBI GI NO: 6677795 NR Description: polymerase
  misc_feature (1)..(239): NCBI GI NO: 23017082 NR Description: hypothetical protein [Thermobifida fusca]
  misc_feature (1)..(224): NCBI GI NO: 133327 NR Description: DNA-directed RNA polymerase II largest subunit
  misc_feature (1)..(224): NCBI GI NO: 2145091 NR Description: RNA polymerase II largest subunit
  misc_feature (1)..(224): NCBI GI NO: 2443334 NR Description: RNA polymerase II largest subunit
  misc_feature (105)..(105): Xaa is any aa, unknown or other
MSPSSPPRRSASTCSGTADGTPRTRSPSATSSSPSPTRPCRAPPSPTGGPPPRSTPTRPSPTSPAASTWPGKPPTSRPRWAARSPGSTSSACSPLRSPRAGSLPXPAAAPTLFSRRPASASRTSAAPYAASTTSPSRRSWATRCPTRGSGTAAAAAPTSARTRSRCRRTWPGAAWRRCGRPTATRASTAWSASSRTSWPSSPRTRSSTRGTPGRTPRRPPRSPTCARGCTVRAAAAGTPGRCRWTRRGGAGM

SEQ ID NO: 41266 - DNA, 1821 bp, Zea mays subsp. mays; identical to SEQ ID NO: 39146
  misc_feature (1)..(1821): Ceres Seq. ID no. 12375293

SEQ ID NO: 41267 - protein, 315 aa, Zea mays subsp. mays; identical to SEQ ID NO: 39147
  peptide (1)..(315): Ceres Seq. ID no. 12375294
  misc_feature (5)..(296): Pfam Name: Pfam Description:  Mlo family
  misc_feature (1)..(296): NCBI GI NO: 13784989 NR Description: seven transmembrane protein Mlo8 [Zea mays]
  misc_feature (1)..(296): NCBI GI NO: 34907492 NR Description: putative seven transmembrane protein
  misc_feature (1)..(296): NCBI GI NO: 15235429 NR Description: AtMlo-h1-like protein; protein id: At4g02600
  misc_feature (5)..(299): NCBI GI NO: 15224823 NR Description: similar to Mlo proteins from H
  misc_feature (3)..(296): NCBI GI NO: 18416311 NR Description: Mlo-like protein; protein id: At4g24250
  misc_feature (6)..(296): NCBI GI NO: 13784979 NR Description: seven transmembrane protein Mlo3 [Zea mays]
  misc_feature (5)..(296): NCBI GI NO: 13784987 NR Description: seven transmembrane protein Mlo7 [Zea mays]
  misc_feature (84)..(296): NCBI GI NO: 7487333 NR Description: hypothetical protein T22A6
  misc_feature (1)..(299): NCBI GI NO: 13784977 NR Description: seven transmembrane protein Mlo2 [Zea mays]
  misc_feature (121)..(301): NCBI GI NO: 13784985 NR Description: seven transmembrane protein Mlo6 [Zea mays]

SEQ ID NO: 41268 - protein, 253 aa, Zea mays subsp. mays; identical to SEQ ID NO: 39148
  peptide (1)..(253): Ceres Seq. ID no. 12375295
  misc_feature (1)..(234): Pfam Name: Pfam Description:  Mlo family
  misc_feature (1)..(234): NCBI GI NO: 13784989 NR Description: seven transmembrane protein Mlo8 [Zea mays]
  misc_feature (1)..(234): NCBI GI NO: 34907492 NR Description: putative seven transmembrane protein
  misc_feature (1)..(234): NCBI GI NO: 15235429 NR Description: AtMlo-h1-like protein; protein id: At4g02600
  misc_feature (1)..(237): NCBI GI NO: 15224823 NR Description: similar to Mlo proteins from H
  misc_feature (1)..(234): NCBI GI NO: 18416311 NR Description: Mlo-like protein; protein id: At4g24250
  misc_feature (1)..(234): NCBI GI NO: 13784979 NR Description: seven transmembrane protein Mlo3 [Zea mays]
  misc_feature (1)..(234): NCBI GI NO: 13784987 NR Description: seven transmembrane protein Mlo7 [Zea mays]
  misc_feature (22)..(234): NCBI GI NO: 7487333 NR Description: hypothetical protein T22A6
  misc_feature (1)..(237): NCBI GI NO: 13784977 NR Description: seven transmembrane protein Mlo2 [Zea mays]
  misc_feature (59)..(239): NCBI GI NO: 13784985 NR Description: seven transmembrane protein Mlo6 [Zea mays]

SEQ ID NO: 41269 - protein, 238 aa, Zea mays subsp. mays; identical to SEQ ID NO: 39149
  peptide (1)..(238): Ceres Seq. ID no. 12375296
  misc_feature (1)..(219): Pfam Name: Pfam Description:  Mlo family
  misc_feature (1)..(219): NCBI GI NO: 13784989 NR Description: seven transmembrane protein Mlo8 [Zea mays]
  misc_feature (1)..(219): NCBI GI NO: 34907492 NR Description: putative seven transmembrane protein
  misc_feature (1)..(219): NCBI GI NO: 15235429 NR Description: AtMlo-h1-like protein; protein id: At4g02600
  misc_feature (1)..(222): NCBI GI NO: 15224823 NR Description: similar to Mlo proteins from H
  misc_feature (1)..(219): NCBI GI NO: 18416311 NR Description: Mlo-like protein; protein id: At4g24250
  misc_feature (1)..(219): NCBI GI NO: 13784979 NR Description: seven transmembrane protein Mlo3 [Zea mays]
  misc_feature (1)..(219): NCBI GI NO: 13784987 NR Description: seven transmembrane protein Mlo7 [Zea mays]
  misc_feature (7)..(219): NCBI GI NO: 7487333 NR Description: hypothetical protein T22A6
  misc_feature (1)..(222): NCBI GI NO: 13784977 NR Description: seven transmembrane protein Mlo2 [Zea mays]
  misc_feature (44)..(224): NCBI GI NO: 13784985 NR Description: seven transmembrane protein Mlo6 [Zea mays]

SEQ ID NO: 41270 - DNA, 1486 bp, Zea mays subsp. mays
  misc_feature (1)..(1486): Ceres Seq. ID no. 12435516
aaacaaaaccctcctcgtcatccgcggccgcttttcccctgacccctgtctcgaccaatcctccctcccacacacatcacacccacaagacaaaaaaaaaaagcgcctttgagcgccgcgcgatctctggtgcttggtgtcgtcgcgacaccagcgttagtttctgtttcagcgcgcacgcgcgtttgtgctgtgggggttgggaagagccgaagagcgaggcggcagcgcgatcgagcggttcggcgggcggcggccgatccgatgggaagggcaccctgctgcgacaagaacaagggcctcaagaaagggccctggacgccggaggaggacaagctcctcgtcgactacatccagaccaacggccatggcagctggcgcctgctccccaagctcgcagggctgaaccggtgcggcaagagctgccgactgcggtggaccaactacctccggccggacatcaagcgcgggcccttcacagccgaggaggagaagtccatcgtccagctccacgccatcgtcggcaacaagtggtccatgatcgcggcacagctcccaggccggacggacaacgagatcaagaactactggaacacgcacctcaagaagcagctgcgtcggatgggcctcgacgagcccccgcccggcccggccgccggctgccccgccgcgcgccacatggcgcagtgggagacggccaggctcgaggccgaggcgcgcctctccctcctcgccgccaccgccgcctcctccggtaccactgcgaccaccaccaccaccacgtctgcagcctcctcgtcctccaccaccgtcgctggcgcggccgacaacaaggcctccaaccccgcggacatcttcctgcgcctgtggagctcggacatcggggactccttccgccgcaagacggacacgccggcggtgcccgcgcttcccggcgcccgtcgtcaagaggaaggacacggcgatcaagcaggagccgcgggcgctgctgctcggcctcggggacgactcctcggcggcgtccaacgacaacgagacggaggtggcggaggcgctggaggcggagtaccagatgttcctcgacttcgcgggcgaagagctgggactattccatggccggcacggcggcttctcgctgttcccgccgctcgacgtgctcgctgaggcgtccctggactcggctttcaagtgaagacgtagccagcaccacgtacgtacacggtactcatacgtacggcaagcggcagtggccaactggccatgcctctacggcttagctatacgcctcgaaatgcgcgcatggatgtatatagatatgcgtgtgactgcactggcatatcggcaattttttgggttaggccagcaagtgcgtggtttagcttgttattatgcagggttggttttggtaggacatcatggtgtatgggggattctctgttcattggagatgctctaatacatcacgagatgttcttcaatcttcggc

SEQ ID NO: 41271 - protein, 424 aa, Zea mays subsp. mays
  peptide (1)..(424): Ceres Seq. ID no. 12435517
  misc_feature (123)..(235): NCBI GI NO: 7489500 NR Description: myb7 protein homolog - rice (fragment)
TKPSSSSAAAFPLTPVSTNPPSHTHHTHKTKKKSAFERRAISGAWCRRDTSVSFCFSAHARLCCGGWEEPKSEAAARSSGSAGGGRSDGKGTLLRQEQGPQERALDAGGGQAPRRLHPDQRPWQLAPAPQARRAEPVRQELPTAVDQLPPAGHQARALHSRGGEVHRPAPRHRRQQVVHDRGTAPRPDGQRDQELLEHAPQEAAASDGPRRAPARPGRRLPRRAPHGAVGDGQARGRGAPLPPRRHRRLLRYHCDHHHHHVCSLLVLHHRRWRGRQQGLQPRGHLPAPVELGHRGLLPPQDGHAGGARASRRPSSRGRTRRSSRSRGRCCSASGTTPRRRPTTTRRRWRRRWRRSTRCSSTSRAKSWDYSMAGTAASRCSRRSTCSLRRPWTRLSSEDVASTTYVHGTHTYGKRQWPTGHASTA

SEQ ID NO: 41272 - protein, 299 aa, Zea mays subsp. mays
  peptide (1)..(299): Ceres Seq. ID no. 12435518
  misc_feature (15)..(62): Pfam Name: Pfam Description:  Myb-like DNA-binding domain
  misc_feature (1)..(198): NCBI GI NO: 19548457 NR Description: P-type R2R3 Myb protein [Zea mays]
  misc_feature (1)..(156): NCBI GI NO: 19072736 NR Description: typical P-type R2R3 Myb protein [Zea mays]
  misc_feature (1)..(211): NCBI GI NO: 15233066 NR Description: myb DNA-binding protein
  misc_feature (1)..(45): NCBI GI NO: 7489500 NR Description: myb7 protein homolog - rice (fragment)
  misc_feature (1)..(174): NCBI GI NO: 28628947 NR Description: MYB1 [Dendrobium sp. XMW-2002-1]
  misc_feature (1)..(112): NCBI GI NO: 1262382 NR Description: myb7 [Oryza sativa (japonica cultivar-group)]
  misc_feature (1)..(154): NCBI GI NO: 15232045 NR Description: myb family transcription factor
  misc_feature (1)..(153): NCBI GI NO: 282964 NR Description: myb-related protein 1 - garden petunia
  misc_feature (1)..(180): NCBI GI NO: 27125807 NR Description: MYB27 protein
  misc_feature (1)..(153): NCBI GI NO: 4886264 NR Description: Myb-related transcription factor mixta-like 1
MGRAPCCDKNKGLKKGPWTPEEDKLLVDYIQTNGHGSWRLLPKLAGLNRCGKSCRLRWTNYLRPDIKRGPFTAEEEKSIVQLHAIVGNKWSMIAAQLPGRTDNEIKNYWNTHLKKQLRRMGLDEPPPGPAAGCPAARHMAQWETARLEAEARLSLLAATAASSGTTATTTTTTSAASSSSTTVAGAADNKASNPADIFLRLWSSDIGDSFRRKTDTPAVPALPGARRQEEGHGDQAGAAGAAARPRGRLLGGVQRQRDGGGGGAGGGVPDVPRLRGRRAGTIPWPARRLLAVPAARRAR

SEQ ID NO: 41273 - DNA, 1209 bp, Zea mays subsp. mays
  misc_feature (1)..(1209): Ceres Seq. ID no. 12368228
gcacgagaccattacctagaacatcctaatcgaaaaagtagtttagttttgctcgcttccacaccgcaccgccgttcccttttttatatcccgcggatgcgcctggcctctgcctcggggtcggggcagctggtgacatcggattcggatcaggccgagatcgaactgctccgatccggcgcttaatttctctctctctctctcgggctagctgcccgggcaaatggacgccgagtggagcggcgacgagagcaagactggcgctgcgggcggagtttcgtcggctgattgcccaggttcgccaccgccggtgtcgccggcgccaccgtcgacgtcgccagctgctaccggtgccgggaggaggcggtcggcgaacaagcgggtggtcaccgtgccgctggcggacgtcagtggcccacggcccaagggcgtcggcgagggcaacacgccgacggacgcgtgggcgtggcgcaagtacggccagaagcccatcaagggctcgccttttccgagggcttactacaggtgcagcagctccaaggggtgcccggccaggaagcaggtggagcggagccgggcggagccggacaaggtgatcgtcacgtactcgttcgagcacagccactcggaggccatggcggcggcgagggcgcagaaccgccaggccccgaagccaaagccggcccagccacagccagtcccgccggagtcctcgtcatccggcagccacgacgtcgctgccgctgccacggtcgtctgcgccggcggcgcgcctattgcggccgagaccgaggccggcgcggaggccgtcgaggtgcacgacgagttcaggtggctctacgacggcgtgtccgtcacctcctcggcgtccccaccggacgtcgaggcggcggacgagatgctgtacggggcgatgttcttcggcgacccgcccgcgcccctccccgacgagttcggcgacgtcggcggcctgttcgacggagaagggggcgaggaggacgccatgttcgcgggtctcggcgagctgcccgagtgcgccatggtgttccggcggcacgccggcgacgggatttcggtggcaggccgggtgaagtgaagtgaatcctgaattgaaggtcctgacatgtgggccggggcaggccggactccaataaaaaccagataaactcatgtagagctccttgatctatctacttttggcttttcttc

SEQ ID NO: 41274 - protein, 290 aa, Zea mays subsp. mays
  peptide (1)..(290): Ceres Seq. ID no. 12368229
  misc_feature (76)..(135): Pfam Name: Pfam Description:  WRKY DNA -binding domain
  misc_feature (6)..(290): NCBI GI NO: 34910854 NR Description: P0435H01.23
  misc_feature (1)..(284): NCBI GI NO: 34909540 NR Description: P0481E12.40
  misc_feature (29)..(252): NCBI GI NO: 22331854 NR Description: WRKY family transcription factor
  misc_feature (255)..(277): NCBI GI NO: 22331854 NR Description: WRKY family transcription factor
  misc_feature (29)..(252): NCBI GI NO: 30694863 NR Description: WRKY family transcription factor
  misc_feature (255)..(277): NCBI GI NO: 30694863 NR Description: WRKY family transcription factor
  misc_feature (47)..(250): NCBI GI NO: 22329838 NR Description: WRKY family transcription factor
  misc_feature (37)..(170): NCBI GI NO: 21553615 NR Description: putative DNA-binding protein
  misc_feature (37)..(170): NCBI GI NO: 18397606 NR Description: WRKY family transcription factor
  misc_feature (37)..(170): NCBI GI NO: 25518142 NR Description: T5I8.10 protein - Arabidopsis thaliana
MDAEWSGDESKTGAAGGVSSADCPGSPPPVSPAPPSTSPAATGAGRRRSANKRVVTVPLADVSGPRPKGVGEGNTPTDAWAWRKYGQKPIKGSPFPRAYYRCSSSKGCPARKQVERSRAEPDKVIVTYSFEHSHSEAMAAARAQNRQAPKPKPAQPQPVPPESSSSGSHDVAAAATVVCAGGAPIAAETEAGAEAVEVHDEFRWLYDGVSVTSSASPPDVEAADEMLYGAMFFGDPPAPLPDEFGDVGGLFDGEGGEEDAMFAGLGELPECAMVFRRHAGDGISVAGRVK

SEQ ID NO: 41275 - protein, 153 aa, Zea mays subsp. mays
  peptide (1)..(153): Ceres Seq. ID no. 12368230
  misc_feature (1)..(153): NCBI GI NO: 34910854 NR Description: P0435H01.23
  misc_feature (1)..(147): NCBI GI NO: 34909540 NR Description: P0481E12.40
  misc_feature (1)..(115): NCBI GI NO: 22331854 NR Description: WRKY family transcription factor
  misc_feature (118)..(140): NCBI GI NO: 22331854 NR Description: WRKY family transcription factor
  misc_feature (1)..(115): NCBI GI NO: 30694863 NR Description: WRKY family transcription factor
  misc_feature (118)..(140): NCBI GI NO: 30694863 NR Description: WRKY family transcription factor
  misc_feature (1)..(113): NCBI GI NO: 22329838 NR Description: WRKY family transcription factor
  misc_feature (1)..(33): NCBI GI NO: 21553615 NR Description: putative DNA-binding protein
  misc_feature (1)..(33): NCBI GI NO: 18397606 NR Description: WRKY family transcription factor
  misc_feature (1)..(33): NCBI GI NO: 25518142 NR Description: T5I8.10 protein - Arabidopsis thaliana
MAAARAQNRQAPKPKPAQPQPVPPESSSSGSHDVAAAATVVCAGGAPIAAETEAGAEAVEVHDEFRWLYDGVSVTSSASPPDVEAADEMLYGAMFFGDPPAPLPDEFGDVGGLFDGEGGEEDAMFAGLGELPECAMVFRRHAGDGISVAGRVK

SEQ ID NO: 41276 - DNA, 1971 bp, Zea mays subsp. mays; identical to SEQ ID NO: 37644
  misc_feature (1)..(1971): Ceres Seq. ID no. 13501211

SEQ ID NO: 41277 - protein, 511 aa, Zea mays subsp. mays; identical to SEQ ID NO: 37645
  peptide (1)..(511): Ceres Seq. ID no. 13501212
  misc_feature (1)..(511): NCBI GI NO: 19850247 NR Description: cytosolic aldehyde dehydrogenase RF2D [Zea mays]
  misc_feature (46)..(511): NCBI GI NO: 19850245 NR Description: cytosolic aldehyde dehydrogenase RF2D [Zea mays]
  misc_feature (8)..(511): NCBI GI NO: 34912252 NR Description: putative cytosolic aldehyde dehydrogenase
  misc_feature (13)..(510): NCBI GI NO: 19850241 NR Description: cytosolic aldehyde dehydrogenase RF2C [Zea mays]
  misc_feature (13)..(510): NCBI GI NO: 19850243 NR Description: cytosolic aldehyde dehydrogenase RF2C [Zea mays]
  misc_feature (15)..(510): NCBI GI NO: 18404212 NR Description: aldehyde dehydrogenase (ALDH1a)
  misc_feature (28)..(510): NCBI GI NO: 7431451 NR Description: rf2 nuclear restorer protein - maize
  misc_feature (27)..(510): NCBI GI NO: 20530131 NR Description: mitochondrial aldehyde dehydrogenase
  misc_feature (28)..(510): NCBI GI NO: 14276718 NR Description: T-cytoplasm male sterility restorer factor 2
  misc_feature (1)..(510): NCBI GI NO: 20530127 NR Description: mitochondrial aldehyde dehydrogenase

SEQ ID NO: 41278 - protein, 423 aa, Zea mays subsp. mays; identical to SEQ ID NO: 37646
  peptide (1)..(423): Ceres Seq. ID no. 13501213
  misc_feature (1)..(423): NCBI GI NO: 19850247 NR Description: cytosolic aldehyde dehydrogenase RF2D [Zea mays]
  misc_feature (1)..(423): NCBI GI NO: 19850245 NR Description: cytosolic aldehyde dehydrogenase RF2D [Zea mays]
  misc_feature (1)..(423): NCBI GI NO: 34912252 NR Description: putative cytosolic aldehyde dehydrogenase
  misc_feature (1)..(422): NCBI GI NO: 19850241 NR Description: cytosolic aldehyde dehydrogenase RF2C [Zea mays]
  misc_feature (1)..(422): NCBI GI NO: 19850243 NR Description: cytosolic aldehyde dehydrogenase RF2C [Zea mays]
  misc_feature (1)..(422): NCBI GI NO: 18404212 NR Description: aldehyde dehydrogenase (ALDH1a)
  misc_feature (1)..(422): NCBI GI NO: 7431451 NR Description: rf2 nuclear restorer protein - maize
  misc_feature (1)..(422): NCBI GI NO: 20530131 NR Description: mitochondrial aldehyde dehydrogenase
  misc_feature (1)..(422): NCBI GI NO: 14276718 NR Description: T-cytoplasm male sterility restorer factor 2
  misc_feature (1)..(422): NCBI GI NO: 20530127 NR Description: mitochondrial aldehyde dehydrogenase

SEQ ID NO: 41279 - protein, 414 aa, Zea mays subsp. mays; identical to SEQ ID NO: 37647
  peptide (1)..(414): Ceres Seq. ID no. 13501214
  misc_feature (1)..(414): NCBI GI NO: 19850247 NR Description: cytosolic aldehyde dehydrogenase RF2D [Zea mays]
  misc_feature (1)..(414): NCBI GI NO: 19850245 NR Description: cytosolic aldehyde dehydrogenase RF2D [Zea mays]
  misc_feature (1)..(414): NCBI GI NO: 34912252 NR Description: putative cytosolic aldehyde dehydrogenase
  misc_feature (1)..(413): NCBI GI NO: 19850241 NR Description: cytosolic aldehyde dehydrogenase RF2C [Zea mays]
  misc_feature (1)..(413): NCBI GI NO: 19850243 NR Description: cytosolic aldehyde dehydrogenase RF2C [Zea mays]
  misc_feature (1)..(413): NCBI GI NO: 18404212 NR Description: aldehyde dehydrogenase (ALDH1a)
  misc_feature (1)..(413): NCBI GI NO: 7431451 NR Description: rf2 nuclear restorer protein - maize
  misc_feature (1)..(413): NCBI GI NO: 20530131 NR Description: mitochondrial aldehyde dehydrogenase
  misc_feature (1)..(413): NCBI GI NO: 14276718 NR Description: T-cytoplasm male sterility restorer factor 2
  misc_feature (1)..(413): NCBI GI NO: 20530127 NR Description: mitochondrial aldehyde dehydrogenase

SEQ ID NO: 41280 - DNA, 1487 bp, Zea mays subsp. mays
  misc_feature (1)..(1487): Ceres Seq. ID no. 12367964
gcacgagaccattacctagaacatcctaatcgaaaaatcacacaaagccgccaagagtcccagcatcgatcgaacagctagctagctagctatatagcgagagggctccatccatatccatccatctgctactgctagcagctgctggctgttgctgcttgcattgagatgtggatgatcagcgcagggcgcatggagcagtgggcgccgacggcggcaatggtggccaccaacgtcgtgatcgccgtcatgacggcgctgatcaagcaggcactgagcctgggcatgaacaggctggtcctcatcactttccgccagatggtggccaccctgttccttggacccatcgcctacttcaaggaaaggaggatgagaccgaagttcacttccgagatcttcgtgtacatgtttctcagtggaattcttgggccggtgctgcttcagttacacactgtttgtcggattggattacacgacggcaacgttcgctgcaacgttcggaaatatgcttccagtggttactttcctgatatcacttgctttcaggttcgaagcactggaggtgaagagcaagtcggggagcgccaagatctcagggacgctcatctccctcggcggcgcaatgatgctcaccttctacaagggttcagcactgacacaaaccaccaccgccgccacgtcgtctccagcatccagcggcggcggccacatcaggcaacaagccggagagcacggcacggtccggtgggtgctgggctccgtctccatgctggccaacgtcgtcggcttcgcgctgtggctgctcctgcagcggaagttcacccgcaagtacccggccgtgtactcggccacggcgttcatgtcgctattcagcttcgtccaggccggggcgctggccctgtcgatccagaggaccagccttgccgttgggccctcagggggaccgtggagatcgccacggtggtgtactgtggtgtagtggcgtctggcattgggtacctgctgctcacctactgcgtggagaagagaggccccgtgttcactgccgccttcagcccgctcgcccagatcttcgtcgccggcatcgatctcttcatcctccacgagcctctctacctcggaagcgtgctgggatcagtgctggttattcttgggctctaccttgtactgtggggcaagagagaggaagctgctgctgctgctgcttcggcaaagccagtgcaggccgaggtagaacagcaagagaaagtgtgattttttccctttattgttcatcacagtacagcgtgccagagcagagggacgaacataattaactagaagcggaagcctgtgtgagtatgtgacagagagtgcatatgatcttcgagccctaaatctatgtatactactgaccaatataacgcaagaaaatgtatgctgatcgatcgatcgatcgaaatgctgtgaaattctctctcaagtacgtgctgagaaagaggttgggc

SEQ ID NO: 41281 - protein, 361 aa, Zea mays subsp. mays
  peptide (1)..(361): Ceres Seq. ID no. 12367965
  misc_feature (254)..(335): Pfam Name: Pfam Description:  Integral membrane protein DUF6
  misc_feature (254)..(361): NCBI GI NO: 34897816 NR Description: P0514G12.28
  misc_feature (9)..(101): NCBI GI NO: 34897816 NR Description: P0514G12.28
  misc_feature (254)..(360): NCBI GI NO: 34897814 NR Description: P0514G12.27
  misc_feature (1)..(92): NCBI GI NO: 34897814 NR Description: P0514G12.27
  misc_feature (254)..(355): NCBI GI NO: 32489301 NR Description: OSJNBa0028I23.24
  misc_feature (35)..(66): NCBI GI NO: 32489301 NR Description: OSJNBa0028I23.24
  misc_feature (254)..(356): NCBI GI NO: 30689857 NR Description: nodulin N21 family protein [Arabidopsis thaliana]
  misc_feature (12)..(92): NCBI GI NO: 30689857 NR Description: nodulin N21 family protein [Arabidopsis thaliana]
  misc_feature (254)..(360): NCBI GI NO: 6815050 NR Description: ESTs AU078644
  misc_feature (254)..(360): NCBI GI NO: 15234185 NR Description: unknown protein; protein id: At4g01450.1
MWMISAGRMEQWAPTAAMVATNVVIAVMTALIKQALSLGMNRLVLITFRQMVATLFLGPIAYFKERRMRPKFTSEIFVYMFLSGILGPVLLQLHTVCRIGLHDGNVRCNVRKYASSGYFPDITCFQVRSTGGEEQVGERQDLRDAHLPRRRNDAHLLQGFSTDTNHHRRHVVSSIQRRRPHQATSRRARHGPVGAGLRLHAGQRRRLRAVAAPAAEVHPQVPGRVLGHGVHVAIQLRPGRGAGPVDPEDQPCRWALRGTVEIATVVYCGVVASGIGYLLLTYCVEKRGPVFTAAFSPLAQIFVAGIDLFILHEPLYLGSVLGSVLVILGLYLVLWGKREEAAAAAASAKPVQAEVEQQEKV

SEQ ID NO: 41282 - protein, 359 aa, Zea mays subsp. mays
  peptide (1)..(359): Ceres Seq. ID no. 12367966
  misc_feature (252)..(333): Pfam Name: Pfam Description:  Integral membrane protein DUF6
  misc_feature (252)..(359): NCBI GI NO: 34897816 NR Description: P0514G12.28
  misc_feature (7)..(99): NCBI GI NO: 34897816 NR Description: P0514G12.28
  misc_feature (252)..(358): NCBI GI NO: 34897814 NR Description: P0514G12.27
  misc_feature (1)..(90): NCBI GI NO: 34897814 NR Description: P0514G12.27
  misc_feature (252)..(353): NCBI GI NO: 32489301 NR Description: OSJNBa0028I23.24
  misc_feature (33)..(64): NCBI GI NO: 32489301 NR Description: OSJNBa0028I23.24
  misc_feature (252)..(354): NCBI GI NO: 30689857 NR Description: nodulin N21 family protein [Arabidopsis thaliana]
  misc_feature (10)..(90): NCBI GI NO: 30689857 NR Description: nodulin N21 family protein [Arabidopsis thaliana]
  misc_feature (252)..(358): NCBI GI NO: 6815050 NR Description: ESTs AU078644
  misc_feature (252)..(358): NCBI GI NO: 15234185 NR Description: unknown protein; protein id: At4g01450.1
MISAGRMEQWAPTAAMVATNVVIAVMTALIKQALSLGMNRLVLITFRQMVATLFLGPIAYFKERRMRPKFTSEIFVYMFLSGILGPVLLQLHTVCRIGLHDGNVRCNVRKYASSGYFPDITCFQVRSTGGEEQVGERQDLRDAHLPRRRNDAHLLQGFSTDTNHHRRHVVSSIQRRRPHQATSRRARHGPVGAGLRLHAGQRRRLRAVAAPAAEVHPQVPGRVLGHGVHVAIQLRPGRGAGPVDPEDQPCRWALRGTVEIATVVYCGVVASGIGYLLLTYCVEKRGPVFTAAFSPLAQIFVAGIDLFILHEPLYLGSVLGSVLVILGLYLVLWGKREEAAAAAASAKPVQAEVEQQEKV

SEQ ID NO: 41283 - protein, 353 aa, Zea mays subsp. mays
  peptide (1)..(353): Ceres Seq. ID no. 12367967
  misc_feature (246)..(327): Pfam Name: Pfam Description:  Integral membrane protein DUF6
  misc_feature (246)..(353): NCBI GI NO: 34897816 NR Description: P0514G12.28
  misc_feature (1)..(93): NCBI GI NO: 34897816 NR Description: P0514G12.28
  misc_feature (246)..(352): NCBI GI NO: 34897814 NR Description: P0514G12.27
  misc_feature (1)..(84): NCBI GI NO: 34897814 NR Description: P0514G12.27
  misc_feature (246)..(347): NCBI GI NO: 32489301 NR Description: OSJNBa0028I23.24
  misc_feature (27)..(58): NCBI GI NO: 32489301 NR Description: OSJNBa0028I23.24
  misc_feature (246)..(348): NCBI GI NO: 30689857 NR Description: nodulin N21 family protein [Arabidopsis thaliana]
  misc_feature (4)..(84): NCBI GI NO: 30689857 NR Description: nodulin N21 family protein [Arabidopsis thaliana]
  misc_feature (246)..(352): NCBI GI NO: 6815050 NR Description: ESTs AU078644
  misc_feature (246)..(352): NCBI GI NO: 15234185 NR Description: unknown protein; protein id: At4g01450.1
MEQWAPTAAMVATNVVIAVMTALIKQALSLGMNRLVLITFRQMVATLFLGPIAYFKERRMRPKFTSEIFVYMFLSGILGPVLLQLHTVCRIGLHDGNVRCNVRKYASSGYFPDITCFQVRSTGGEEQVGERQDLRDAHLPRRRNDAHLLQGFSTDTNHHRRHVVSSIQRRRPHQATSRRARHGPVGAGLRLHAGQRRRLRAVAAPAAEVHPQVPGRVLGHGVHVAIQLRPGRGAGPVDPEDQPCRWALRGTVEIATVVYCGVVASGIGYLLLTYCVEKRGPVFTAAFSPLAQIFVAGIDLFILHEPLYLGSVLGSVLVILGLYLVLWGKREEAAAAAASAKPVQAEVEQQEKV

SEQ ID NO: 41284 - DNA, 1521 bp, Zea mays subsp. mays
  misc_feature (1)..(1521): Ceres Seq. ID no. 12367968
gcacgagaccattacctagaacatcctaatcgaaaaagtagtcagaccatagctaagctgagagcaaagatgtcttggcggcgaaaccagctacgtgcgtttctcgttctcgccgtcatcctcctcatcaccgcagctacctaccgagccaatgcgcagccggcgcctccagcagacccaacgccagccgctgacacctgcgccgaccccagcgtggaaggggcgtgccgcaacgtcccgaaggcgctgcgcctgaagctgatcgccatcccgacgatcctcgtctccagcgtgatcggcgtgtgcctgccgctcttgtcccgctctgtgcccgcgctccgccccgaccgcaacctcttcgtcatcgtcaaggccttcgcctcaggcgtcatcctcgcgacgggctacatgcacgtgctcccggactccttcagcaacctcacctcgccgtgcctgccgcggaagccgtgggccgatttctccttcaccaccttcgtcgccatgctcgccgccctgttcacgctcatggtggactcgctcatgctcagcttctacaaccggaggaagggtggcaacacctccggccgacgcactagcggcgcggtcgccgaccacgagagcccggcgcatgagcaccactggcacagccacggccatggacatggacatggacatgctgggggcatcgtggtggctgacaagcccgaggacgatgaggccagccaggtgcagctccgccggaaccgcgttgtcgttcaggtcctggagatgggcatcgtcgtgcactcggtggtgatcgggctgggcatgggagcgtcgcagaacgtgtgcaccatccggccgctggtgacggcgatgtgcttccaccagctcttcgagggcatgggactcggcggctgcatcctgcaggcggagtacggcgcgaagatgaaggcggggctggtgttcttcttctccacgacgacgccgttcgggatcgcgctggggctggcgctcaccaaggtgtacagggagaacagccccacggcgctcatcgtggtgggcctgctcaacgcggcctcggcggggctgctccactacatggcgctcgtggagctcctggccgccgacttcatggggcccaagctgcagagcagcgtcaggctccagctcctctgcttcctcgccgtcctcctcggcgccggcggcatgtccatcatggccaagtgggcgtgatcgtattcgtatctgagacgacatgacacagtactgttacaccaacactgcctgcagtctagctatctgcaagactgcatcgctgcatgcatgttcctcctatagctggctgttgtatcatttcgcgtgcttcgttgctccgtgcgcttccgtgtcgccatcaggaagctaggtatatattagacgcagatagcgttgttgtcatgactattcaacgtccacggtacaatacaaaagtagtactctatctatgtattaactatgttcttaaatatttgtcgtggtaaataaaaaaacaatataaat

SEQ ID NO: 41285 - protein, 404 aa, Zea mays subsp. mays
  peptide (1)..(404): Ceres Seq. ID no. 12367969
  misc_feature (83)..(401): Pfam Name: Pfam Description:  ZIP Zinc transporter
  misc_feature (36)..(404): NCBI GI NO: 18700309 NR Description: iron regulated metal transporter [Oryza sativa]
  misc_feature (36)..(404): NCBI GI NO: 32966055 NR Description: iron transporter Fe3
  misc_feature (39)..(404): NCBI GI NO: 40888850 NR Description: TPA: iron regulated transporter-like protein
  misc_feature (36)..(404): NCBI GI NO: 40538928 NR Description: putative metal transporter
  misc_feature (56)..(404): NCBI GI NO: 27549575 NR Description: root iron transporter protein IRT1
  misc_feature (73)..(404): NCBI GI NO: 4836773 NR Description: iron-regulated transporter 2
  misc_feature (217)..(404): NCBI GI NO: 16304676 NR Description: putative Fe(II) transporter [Thlaspi caerulescens]
  misc_feature (57)..(188): NCBI GI NO: 16304676 NR Description: putative Fe(II) transporter [Thlaspi caerulescens]
  misc_feature (73)..(404): NCBI GI NO: 4836771 NR Description: iron-regulated transporter 1
  misc_feature (217)..(404): NCBI GI NO: 22328811 NR Description: Fe(II) transport protein; protein id: At4g19690
ARDHYLEHPNRKSSQTIAKLRAKMSWRRNQLRAFLVLAVILLITAATYRANAQPAPPADPTPAADTCADPSVEGACRNVPKALRLKLIAIPTILVSSVIGVCLPLLSRSVPALRPDRNLFVIVKAFASGVILATGYMHVLPDSFSNLTSPCLPRKPWADFSFTTFVAMLAALFTLMVDSLMLSFYNRRKGGNTSGRRTSGAVADHESPAHEHHWHSHGHGHGHGHAGGIVVADKPEDDEASQVQLRRNRVVVQVLEMGIVVHSVVIGLGMGASQNVCTIRPLVTAMCFHQLFEGMGLGGCILQAEYGAKMKAGLVFFFSTTTPFGIALGLALTKVYRENSPTALIVVGLLNAASAGLLHYMALVELLAADFMGPKLQSSVRLQLLCFLAVLLGAGGMSIMAKWA

SEQ ID NO: 41286 - protein, 381 aa, Zea mays subsp. mays
  peptide (1)..(381): Ceres Seq. ID no. 12367970
  misc_feature (60)..(378): Pfam Name: Pfam Description:  ZIP Zinc transporter
  misc_feature (13)..(381): NCBI GI NO: 18700309 NR Description: iron regulated metal transporter [Oryza sativa]
  misc_feature (13)..(381): NCBI GI NO: 32966055 NR Description: iron transporter Fe3
  misc_feature (16)..(381): NCBI GI NO: 40888850 NR Description: TPA: iron regulated transporter-like protein
  misc_feature (13)..(381): NCBI GI NO: 40538928 NR Description: putative metal transporter
  misc_feature (33)..(381): NCBI GI NO: 27549575 NR Description: root iron transporter protein IRT1
  misc_feature (50)..(381): NCBI GI NO: 4836773 NR Description: iron-regulated transporter 2
  misc_feature (194)..(381): NCBI GI NO: 16304676 NR Description: putative Fe(II) transporter [Thlaspi caerulescens]
  misc_feature (34)..(165): NCBI GI NO: 16304676 NR Description: putative Fe(II) transporter [Thlaspi caerulescens]
  misc_feature (50)..(381): NCBI GI NO: 4836771 NR Description: iron-regulated transporter 1
  misc_feature (194)..(381): NCBI GI NO: 22328811 NR Description: Fe(II) transport protein; protein id: At4g19690
MSWRRNQLRAFLVLAVILLITAATYRANAQPAPPADPTPAADTCADPSVEGACRNVPKALRLKLIAIPTILVSSVIGVCLPLLSRSVPALRPDRNLFVIVKAFASGVILATGYMHVLPDSFSNLTSPCLPRKPWADFSFTTFVAMLAALFTLMVDSLMLSFYNRRKGGNTSGRRTSGAVADHESPAHEHHWHSHGHGHGHGHAGGIVVADKPEDDEASQVQLRRNRVVVQVLEMGIVVHSVVIGLGMGASQNVCTIRPLVTAMCFHQLFEGMGLGGCILQAEYGAKMKAGLVFFFSTTTPFGIALGLALTKVYRENSPTALIVVGLLNAASAGLLHYMALVELLAADFMGPKLQSSVRLQLLCFLAVLLGAGGMSIMAKWA

SEQ ID NO: 41287 - protein, 268 aa, Zea mays subsp. mays
  peptide (1)..(268): Ceres Seq. ID no. 12367971
  misc_feature (1)..(265): Pfam Name: Pfam Description:  ZIP Zinc transporter
  misc_feature (1)..(268): NCBI GI NO: 18700309 NR Description: iron regulated metal transporter [Oryza sativa]
  misc_feature (1)..(268): NCBI GI NO: 32966055 NR Description: iron transporter Fe3
  misc_feature (1)..(268): NCBI GI NO: 40888850 NR Description: TPA: iron regulated transporter-like protein
  misc_feature (1)..(268): NCBI GI NO: 40538928 NR Description: putative metal transporter
  misc_feature (1)..(268): NCBI GI NO: 27549575 NR Description: root iron transporter protein IRT1
  misc_feature (1)..(268): NCBI GI NO: 4836773 NR Description: iron-regulated transporter 2
  misc_feature (81)..(268): NCBI GI NO: 16304676 NR Description: putative Fe(II) transporter [Thlaspi caerulescens]
  misc_feature (1)..(52): NCBI GI NO: 16304676 NR Description: putative Fe(II) transporter [Thlaspi caerulescens]
  misc_feature (1)..(268): NCBI GI NO: 4836771 NR Description: iron-regulated transporter 1
  misc_feature (81)..(268): NCBI GI NO: 22328811 NR Description: Fe(II) transport protein; protein id: At4g19690
MHVLPDSFSNLTSPCLPRKPWADFSFTTFVAMLAALFTLMVDSLMLSFYNRRKGGNTSGRRTSGAVADHESPAHEHHWHSHGHGHGHGHAGGIVVADKPEDDEASQVQLRRNRVVVQVLEMGIVVHSVVIGLGMGASQNVCTIRPLVTAMCFHQLFEGMGLGGCILQAEYGAKMKAGLVFFFSTTTPFGIALGLALTKVYRENSPTALIVVGLLNAASAGLLHYMALVELLAADFMGPKLQSSVRLQLLCFLAVLLGAGGMSIMAKWA

SEQ ID NO: 41288 - DNA, 1584 bp, Zea mays subsp. mays
  misc_feature (1)..(1584): Ceres Seq. ID no. 12375563
gcacgagaccattacctagaacatcctaatcgaaaaatcgcaccccgcaccccgctcctccctcctcctgctccggctcccttcctccacagctcgaataaagtcccctcctcttccagtcttcctcctccgcgctccaatcttcccagcggcacggtttcggttcttgcagagtagcacggaggttccttcgttgggggttcttggtctgccttgagcgatttggtgcgccgcggattgttgtgtggttgtgagttgtgactgcagagacaagggccgtgtggagagtcgagccatcgaggtcgaggaggagggaagggaaaaggggggcgcatgggcggccagtggctgggggaggggatgccgtcgtccaacctgcagtgcttcttggactgcaccacccccaccgtcgagacgcacattctccccaagacgaatggacgattgccgaccgacgcctggcaccacgctgagatggacagcgtcgagtacttcaatcttgccgacctctgggaacagtactatgaatggagcgcgtacggcgccggagctacggtgcagctcccaggaggggacagagtagttcagtactatgttccatacctgtcagggatgcagctatacaccaacaaggtcctgactgcatccagaagttttggtgaagataatggcatggatttatggagtgatgatgaggacaacgagaagatgtcgagatcctggagttccacctctgatgaatcattgttcaactgtgatgtgttatggtccaacaggaagcgtccagggcacctgtactttgagttctttgaagtaggttcaccttatggaagggttcctctcattgacaaggtttatgaactatcccagggctttcctggattgacatcactgaagagtgctgagctttcgcctgttagctggatgtcagttgcctggtaccctatataccacattccttaccagcgcagcgtgaaggacttatctgcatgcttcctaacttaccataccatttcctcctcgtttcaagatcacgggcttgagaccatgaccactgattgttgccatccagttgcaaacggcaaacaaaatggccacatggataagaagagcaacaccgtatcactgcctccatttggcctcgcagcacacaagatacaaggttccctctggaccaaccccatgacaggagaccgcagaaagatggacttcctcttcagtgcggcagactcctggctgaagcagcttggagtccagcatcatgacttcaacttcttcatcactcaccccatgtgaactgctgatccggagtggcttgcaaagaaccacatgggtacagtttgaagctagttatattacctacaccaccaccaacggggtagcaaaacgtttacagtacaatgcactggtgaaacgagtctaacaatcgcaggatagatttatacttgagtttactgctgcagcgaataccaaacatgtcggcactcaaaaaggttttctgtttcttgtttcttggcagaaaatgtaactgatctgtacagaagttttgcaactaatttggtatccaatgtgggggttggatcc

SEQ ID NO: 41289 - protein, 320 aa, Zea mays subsp. mays
  peptide (1)..(320): Ceres Seq. ID no. 12375564
  misc_feature (13)..(315): Pfam Name: DUF789 Pfam Description: Protein of unknown function
  misc_feature (1)..(320): NCBI GI NO: 37535654 NR Description: unknown protein
  misc_feature (13)..(315): NCBI GI NO: 22328289 NR Description: hypothetical protein; protein id: At4g03420
  misc_feature (13)..(315): NCBI GI NO: 25373431 NR Description: hypothetical protein AT4g03420
  misc_feature (13)..(320): NCBI GI NO: 9280648 NR Description: F21B7.22 [Arabidopsis thaliana]
  misc_feature (13)..(320): NCBI GI NO: 18379117 NR Description: expressed protein; protein id: At1g03610
  misc_feature (13)..(320): NCBI GI NO: 18958013 NR Description: At1g03610/F21B7_13 [Arabidopsis thaliana]
  misc_feature (13)..(233): NCBI GI NO: 21594686 NR Description: unknown [Arabidopsis thaliana]
  misc_feature (245)..(319): NCBI GI NO: 21594686 NR Description: unknown [Arabidopsis thaliana]
  misc_feature (13)..(233): NCBI GI NO: 18417136 NR Description: putative protein; protein id: At4g28150
  misc_feature (245)..(317): NCBI GI NO: 18417136 NR Description: putative protein; protein id: At4g28150
MGGQWLGEGMPSSNLQCFLDCTTPTVETHILPKTNGRLPTDAWHHAEMDSVEYFNLADLWEQYYEWSAYGAGATVQLPGGDRVVQYYVPYLSGMQLYTNKVLTASRSFGEDNGMDLWSDDEDNEKMSRSWSSTSDESLFNCDVLWSNRKRPGHLYFEFFEVGSPYGRVPLIDKVYELSQGFPGLTSLKSAELSPVSWMSVAWYPIYHIPYQRSVKDLSACFLTYHTISSSFQDHGLETMTTDCCHPVANGKQNGHMDKKSNTVSLPPFGLAAHKIQGSLWTNPMTGDRRKMDFLFSAADSWLKQLGVQHHDFNFFITHPM

SEQ ID NO: 41290 - protein, 311 aa, Zea mays subsp. mays
  peptide (1)..(311): Ceres Seq. ID no. 12375565
  misc_feature (4)..(306): Pfam Name: DUF789 Pfam Description: Protein of unknown function
  misc_feature (1)..(311): NCBI GI NO: 37535654 NR Description: unknown protein
  misc_feature (4)..(306): NCBI GI NO: 22328289 NR Description: hypothetical protein; protein id: At4g03420
  misc_feature (4)..(306): NCBI GI NO: 25373431 NR Description: hypothetical protein AT4g03420
  misc_feature (4)..(311): NCBI GI NO: 9280648 NR Description: F21B7.22 [Arabidopsis thaliana]
  misc_feature (4)..(311): NCBI GI NO: 18379117 NR Description: expressed protein; protein id: At1g03610
  misc_feature (4)..(311): NCBI GI NO: 18958013 NR Description: At1g03610/F21B7_13 [Arabidopsis thaliana]
  misc_feature (4)..(224): NCBI GI NO: 21594686 NR Description: unknown [Arabidopsis thaliana]
  misc_feature (236)..(310): NCBI GI NO: 21594686 NR Description: unknown [Arabidopsis thaliana]
  misc_feature (4)..(224): NCBI GI NO: 18417136 NR Description: putative protein; protein id: At4g28150
  misc_feature (236)..(308): NCBI GI NO: 18417136 NR Description: putative protein; protein id: At4g28150
MPSSNLQCFLDCTTPTVETHILPKTNGRLPTDAWHHAEMDSVEYFNLADLWEQYYEWSAYGAGATVQLPGGDRVVQYYVPYLSGMQLYTNKVLTASRSFGEDNGMDLWSDDEDNEKMSRSWSSTSDESLFNCDVLWSNRKRPGHLYFEFFEVGSPYGRVPLIDKVYELSQGFPGLTSLKSAELSPVSWMSVAWYPIYHIPYQRSVKDLSACFLTYHTISSSFQDHGLETMTTDCCHPVANGKQNGHMDKKSNTVSLPPFGLAAHKIQGSLWTNPMTGDRRKMDFLFSAADSWLKQLGVQHHDFNFFITHPM

SEQ ID NO: 41291 - protein, 273 aa, Zea mays subsp. mays
  peptide (1)..(273): Ceres Seq. ID no. 12375566
  misc_feature (1)..(268): Pfam Name: DUF789 Pfam Description: Protein of unknown function
  misc_feature (1)..(273): NCBI GI NO: 37535654 NR Description: unknown protein
  misc_feature (1)..(268): NCBI GI NO: 22328289 NR Description: hypothetical protein; protein id: At4g03420
  misc_feature (1)..(268): NCBI GI NO: 25373431 NR Description: hypothetical protein AT4g03420
  misc_feature (1)..(273): NCBI GI NO: 9280648 NR Description: F21B7.22 [Arabidopsis thaliana]
  misc_feature (1)..(273): NCBI GI NO: 18379117 NR Description: expressed protein; protein id: At1g03610
  misc_feature (1)..(273): NCBI GI NO: 18958013 NR Description: At1g03610/F21B7_13 [Arabidopsis thaliana]
  misc_feature (1)..(186): NCBI GI NO: 21594686 NR Description: unknown [Arabidopsis thaliana]
  misc_feature (198)..(272): NCBI GI NO: 21594686 NR Description: unknown [Arabidopsis thaliana]
  misc_feature (1)..(186): NCBI GI NO: 18417136 NR Description: putative protein; protein id: At4g28150
  misc_feature (198)..(270): NCBI GI NO: 18417136 NR Description: putative protein; protein id: At4g28150
MDSVEYFNLADLWEQYYEWSAYGAGATVQLPGGDRVVQYYVPYLSGMQLYTNKVLTASRSFGEDNGMDLWSDDEDNEKMSRSWSSTSDESLFNCDVLWSNRKRPGHLYFEFFEVGSPYGRVPLIDKVYELSQGFPGLTSLKSAELSPVSWMSVAWYPIYHIPYQRSVKDLSACFLTYHTISSSFQDHGLETMTTDCCHPVANGKQNGHMDKKSNTVSLPPFGLAAHKIQGSLWTNPMTGDRRKMDFLFSAADSWLKQLGVQHHDFNFFITHPM

SEQ ID NO: 41292 - DNA, 433 bp, Zea mays subsp. mays
  misc_feature (1)..(433): Ceres Seq. ID no. 2789525
catgttcgttggtctgcaaggttctggtaaaactactacttgtacaaaatatgcttattatcatcagaagaaaggattcaaaccagcactggtttgtgctgatacatttagggctggtgcttttgatcagttaaagcaaaatgcaacgaaggccaagattcccttttatggaagctacatggaatctgatccagtgaaaattgctgttgagggtgtggagaggttcaagaaagaaaactgtgatctcatcattgtggacacaagtggaaggcacaaacaagaagcggcactctttgaagaaatgcggcaagtttcggaagcaacaaaaccagacctggtgatttttgtgatggacagtagtattggtcaggctgcatttgatcaagcacaggcatttaaacaaagtgtttctgttggtgcctgtgawtattac

SEQ ID NO: 41293 - protein, 144 aa, Zea mays subsp. mays
  peptide (1)..(144): Ceres Seq. ID no. 2789526
  misc_feature (1)..(140): NCBI GI NO: 34909956 NR Description: putative signal recognition particle 54K protein
  misc_feature (1)..(140): NCBI GI NO: 1711512 NR Description: SIGNAL RECOGNITION PARTICLE 54 KD PROTEIN 2
  misc_feature (1)..(140): NCBI GI NO: 515681 NR Description: signal recognition particle 54 kDa subunit
  misc_feature (1)..(140): NCBI GI NO: 18402407 NR Description: signal recognition particle 54 kDa protein 2
  misc_feature (1)..(140): NCBI GI NO: 1711508 NR Description: SIGNAL RECOGNITION PARTICLE 54 KD PROTEIN 1
  misc_feature (1)..(140): NCBI GI NO: 1711511 NR Description: SIGNAL RECOGNITION PARTICLE 54 KD PROTEIN 2
  misc_feature (1)..(140): NCBI GI NO: 2119055 NR Description: signal recognition particle 54K protein - tomato
  misc_feature (1)..(140): NCBI GI NO: 33235565 NR Description: signal recognition particle 54kDa subunit
  misc_feature (1)..(140): NCBI GI NO: 1711509 NR Description: SIGNAL RECOGNITION PARTICLE 54 KD PROTEIN 1
  misc_feature (1)..(140): NCBI GI NO: 1711510 NR Description: Signal recognition particle 54 kDa protein 2
  misc_feature (142)..(142): Xaa is any aa, unknown or other
MFVGLQGSGKTTTCTKYAYYHQKKGFKPALVCADTFRAGAFDQLKQNATKAKIPFYGSYMESDPVKIAVEGVERFKKENCDLIIVDTSGRHKQEAALFEEMRQVSEATKPDLVIFVMDSSIGQAAFDQAQAFKQSVSVGACXYY

SEQ ID NO: 41294 - protein, 85 aa, Zea mays subsp. mays
  peptide (1)..(85): Ceres Seq. ID no. 2789527
  misc_feature (1)..(81): NCBI GI NO: 34909956 NR Description: putative signal recognition particle 54K protein
  misc_feature (1)..(81): NCBI GI NO: 1711512 NR Description: SIGNAL RECOGNITION PARTICLE 54 KD PROTEIN 2
  misc_feature (1)..(81): NCBI GI NO: 515681 NR Description: signal recognition particle 54 kDa subunit
  misc_feature (1)..(81): NCBI GI NO: 18402407 NR Description: signal recognition particle 54 kDa protein 2
  misc_feature (1)..(81): NCBI GI NO: 1711508 NR Description: SIGNAL RECOGNITION PARTICLE 54 KD PROTEIN 1
  misc_feature (1)..(81): NCBI GI NO: 1711511 NR Description: SIGNAL RECOGNITION PARTICLE 54 KD PROTEIN 2
  misc_feature (1)..(81): NCBI GI NO: 2119055 NR Description: signal recognition particle 54K protein - tomato
  misc_feature (1)..(81): NCBI GI NO: 33235565 NR Description: signal recognition particle 54kDa subunit
  misc_feature (1)..(81): NCBI GI NO: 1711509 NR Description: SIGNAL RECOGNITION PARTICLE 54 KD PROTEIN 1
  misc_feature (1)..(81): NCBI GI NO: 1711510 NR Description: Signal recognition particle 54 kDa protein 2
  misc_feature (83)..(83): Xaa is any aa, unknown or other
MESDPVKIAVEGVERFKKENCDLIIVDTSGRHKQEAALFEEMRQVSEATKPDLVIFVMDSSIGQAAFDQAQAFKQSVSVGACXYY

SEQ ID NO: 41295 - DNA, 675 bp, Zea mays subsp. mays
  misc_feature (1)..(675): Ceres Seq. ID no. 12375559
gcacgagaccattacctagaacatcctaatcgaaaaatgttcgtacccaccgccatcactacgcatgccggtccgttaagcttcctccccagcttaccgcgtgctgaaaccctagccgccgaggagccgacgatgtcggacccttacaacccgtactaccgtggagccttcccaggcggcgacggtgcgccgccgccgctgccgccttactcggactttgatgtcgacctcgtcgcgacccgttacaccggcaccccacggtctcatccatcctctgccgacgtcggcgccttcgaatcgcatctcggcgcgagacgattcgcggaagttctctatcagtaccaccaatcttgtatgggaagtcatagtactgttggccagagtgagactttatattcatcaattactatggctaagcgccctaggcttgaaagcagccttcctatatatccacaacgaccggggcaaaaggactgtgccttctatatgagcactggaacctgtaagtatggagagacttgcaaatttgaccatccacaatgggttccagagggtggggttccaaactggaaagaggtcctgaatgatgaggattattatcctgagcgaccaggggaaccagattgtccttatttattgagtagtagatgtaagtttaaatctaaatgcaagttc

SEQ ID NO: 41296 - protein, 225 aa, Zea mays subsp. mays
  peptide (1)..(225): Ceres Seq. ID no. 12375560
  misc_feature (154)..(180): Pfam Name: and similar Pfam Description: Zinc finger C-x8-C-x5-C-x3-H type
  misc_feature (33)..(194): NCBI GI NO: 34912676 NR Description: P0686E09.7
  misc_feature (103)..(224): NCBI GI NO: 22331028 NR Description: hypothetical protein; protein id: At3g12680
  misc_feature (70)..(224): NCBI GI NO: 22507458 NR Description: Unknown (protein for MGC:30371) [Mus musculus]
  misc_feature (163)..(224): NCBI GI NO: 11994409 NR Description: zinc finger protein-like [Arabidopsis thaliana]
  misc_feature (176)..(224): NCBI GI NO: 12321969 NR Description: zinc finger protein, putative, 5' partial
  misc_feature (150)..(224): NCBI GI NO: 34902926 NR Description: putative zinc finger protein
  misc_feature (113)..(224): NCBI GI NO: 18390466 NR Description: zinc finger protein 2, putative
  misc_feature (151)..(224): NCBI GI NO: 34902926 NR Description: putative zinc finger protein
  misc_feature (150)..(224): NCBI GI NO: 11994409 NR Description: zinc finger protein-like [Arabidopsis thaliana]
  misc_feature (150)..(224): NCBI GI NO: 12321969 NR Description: zinc finger protein, putative, 5' partial
ARDHYLEHPNRKMFVPTAITTHAGPLSFLPSLPRAETLAAEEPTMSDPYNPYYRGAFPGGDGAPPPLPPYSDFDVDLVATRYTGTPRSHPSSADVGAFESHLGARRFAEVLYQYHQSCMGSHSTVGQSETLYSSITMAKRPRLESSLPIYPQRPGQKDCAFYMSTGTCKYGETCKFDHPQWVPEGGVPNWKEVLNDEDYYPERPGEPDCPYLLSSRCKFKSKCKF

SEQ ID NO: 41297 - protein, 213 aa, Zea mays subsp. mays
  peptide (1)..(213): Ceres Seq. ID no. 12375561
  misc_feature (142)..(168): Pfam Name: and similar Pfam Description: Zinc finger C-x8-C-x5-C-x3-H type
  misc_feature (21)..(182): NCBI GI NO: 34912676 NR Description: P0686E09.7
  misc_feature (91)..(212): NCBI GI NO: 22331028 NR Description: hypothetical protein; protein id: At3g12680
  misc_feature (58)..(212): NCBI GI NO: 22507458 NR Description: Unknown (protein for MGC:30371) [Mus musculus]
  misc_feature (151)..(212): NCBI GI NO: 11994409 NR Description: zinc finger protein-like [Arabidopsis thaliana]
  misc_feature (164)..(212): NCBI GI NO: 12321969 NR Description: zinc finger protein, putative, 5' partial
  misc_feature (138)..(212): NCBI GI NO: 34902926 NR Description: putative zinc finger protein
  misc_feature (101)..(212): NCBI GI NO: 18390466 NR Description: zinc finger protein 2, putative
  misc_feature (139)..(212): NCBI GI NO: 34902926 NR Description: putative zinc finger protein
  misc_feature (138)..(212): NCBI GI NO: 11994409 NR Description: zinc finger protein-like [Arabidopsis thaliana]
  misc_feature (138)..(212): NCBI GI NO: 12321969 NR Description: zinc finger protein, putative, 5' partial
MFVPTAITTHAGPLSFLPSLPRAETLAAEEPTMSDPYNPYYRGAFPGGDGAPPPLPPYSDFDVDLVATRYTGTPRSHPSSADVGAFESHLGARRFAEVLYQYHQSCMGSHSTVGQSETLYSSITMAKRPRLESSLPIYPQRPGQKDCAFYMSTGTCKYGETCKFDHPQWVPEGGVPNWKEVLNDEDYYPERPGEPDCPYLLSSRCKFKSKCKF

SEQ ID NO: 41298 - protein, 181 aa, Zea mays subsp. mays
  peptide (1)..(181): Ceres Seq. ID no. 12375562
  misc_feature (110)..(136): Pfam Name: and similar Pfam Description: Zinc finger C-x8-C-x5-C-x3-H type
  misc_feature (1)..(150): NCBI GI NO: 34912676 NR Description: P0686E09.7
  misc_feature (59)..(180): NCBI GI NO: 22331028 NR Description: hypothetical protein; protein id: At3g12680
  misc_feature (26)..(180): NCBI GI NO: 22507458 NR Description: Unknown (protein for MGC:30371) [Mus musculus]
  misc_feature (119)..(180): NCBI GI NO: 11994409 NR Description: zinc finger protein-like [Arabidopsis thaliana]
  misc_feature (132)..(180): NCBI GI NO: 12321969 NR Description: zinc finger protein, putative, 5' partial
  misc_feature (106)..(180): NCBI GI NO: 34902926 NR Description: putative zinc finger protein
  misc_feature (69)..(180): NCBI GI NO: 18390466 NR Description: zinc finger protein 2, putative
  misc_feature (107)..(180): NCBI GI NO: 34902926 NR Description: putative zinc finger protein
  misc_feature (106)..(180): NCBI GI NO: 11994409 NR Description: zinc finger protein-like [Arabidopsis thaliana]
  misc_feature (106)..(180): NCBI GI NO: 12321969 NR Description: zinc finger protein, putative, 5' partial
MSDPYNPYYRGAFPGGDGAPPPLPPYSDFDVDLVATRYTGTPRSHPSSADVGAFESHLGARRFAEVLYQYHQSCMGSHSTVGQSETLYSSITMAKRPRLESSLPIYPQRPGQKDCAFYMSTGTCKYGETCKFDHPQWVPEGGVPNWKEVLNDEDYYPERPGEPDCPYLLSSRCKFKSKCKF

SEQ ID NO: 41299 - DNA, 1787 bp, Zea mays subsp. mays
  misc_feature (1)..(1787): Ceres Seq. ID no. 12418176
gcacgagaccattacctagaacatcctaatcgaaaaactttccctccttgccacttcggattctcctcctctgcctttcgcttcgtcactcgccacgccacgccaaagaccaagaaaaaaaaggacgattttttcctagctgcaacttccctcacgccatggaggaggagatgccgctgcagctgctctccgcttcctccgccgccgtcgctgtctgagctcccccttcgctcgatctctccatcgggccgggcctacctctcctagcagtgaatcaaaccatggcagctttcgccgcgctgttcgaccccctgtactgcccggaggagcacctcgatctgtaccgcgacgaacccggcgagggtgcggacgagcagtggccgggccagcacggacagcaggagccggctgtcctcgacgacgagctgccggcactgttcgaggcacaccgggccaaggagggggtggtgctggcggaggatggcgggtacggcggcgcagctgggcgtgaggccgcggtcggctgggtttcacgcgccgcggcgcggctaggcttctccgcgctcaccgccgcgctcgccgccgcctacctcgaccgctgcttcctccccgggggcgcgctccggctcggcgaccagccctggatggcgcgcctagccgccgtcacctgcttcgcgctcgccgccaaggtcgaggagacgcgcgtgccgccgctcctcgacctccagctctacgccgccgctgacgccgcggatccgtacgtattcgaggccaagacggtgcgccggatggagctgctcgtgctctccgcgcttgggtggcggatgcaccctgtcacgcccttctcctacctccagcccgtcctcgccgacgctgcgacgcgcctgcgtagctgcgagggcgtcctgctcgcggtcatggccgactggaggtggcctcggcaccggccttcggcgtgggccgccgccgcgttgctgatcacagccgccgccggcgacggcgacacggagctcctggcgctcatcaatgcccccgaggacaagaccgccgagtgtgccaagatcatctccgaggtgacgggcatgagcttcctcgcctgcgatgtcggcgtgagcgccggaaataagcgtaagcacgcggcggcgcagttgtactcgccgccgccgagcccgagcggcgtgatcggcgcgctgtcctgcttcagctgcgagagctcgacgtccgccaccgctatggctgcggcggtcggcccgtgggcgccgtcggcgtccgtgtccgtgtcgtcctctccagagccaccaggtcgggcccccaagcgcgcagcggcggcgtcggcgtcggcgtcggcgtcagccggggtcgcgccaccggtccaggtcccgcatcagctaccccccgacgaggagagccgcggcgcctggccgtccacctgcgccgcgtgacgcaccgtgccggaaacggtgcctatggcgagaccgccgttcggtggcggtggagaatggagaacaaggagcatcattggctcgcgtcggtgagcaggagaacgaactattttgcccattgccgtgacagatggggggcaagagagataagaaaagatgtccttgtttgcatgcttatggcgggagtaatgtttgcatgcttgtggcagcacattttgcaatgatggttctcagagaacttagctggaggtggaagatgattagcggataatttgccgtcgagatcgatggcgatttagtatttgttgcaactgtagtgatgctagttcttgccgtgttcttgtt

SEQ ID NO: 41300 - protein, 386 aa, Zea mays subsp. mays
  peptide (1)..(386): Ceres Seq. ID no. 12418177
  misc_feature (47)..(183): Pfam Name: Pfam Description:  Cyclin, N-terminal domain
  misc_feature (7)..(339): NCBI GI NO: 4160302 NR Description: cyclin D3.2 protein [Nicotiana tabacum]
  misc_feature (47)..(338): NCBI GI NO: 6448482 NR Description: cyclin D3a [Antirrhinum majus]
  misc_feature (7)..(357): NCBI GI NO: 27435851 NR Description: cyclin D [Populus tremula x Populus tremuloides]
  misc_feature (1)..(339): NCBI GI NO: 5679622 NR Description: cyclin D3.1 [Lycopersicon esculentum]
  misc_feature (7)..(337): NCBI GI NO: 3915637 NR Description: Cyclin delta-3
  misc_feature (7)..(337): NCBI GI NO: 15235254 NR Description: Cyclin D3;1; protein id: At4g34160.1
  misc_feature (74)..(315): NCBI GI NO: 4160300 NR Description: cyclin D3.1 protein [Nicotiana tabacum]
  misc_feature (9)..(339): NCBI GI NO: 21745138 NR Description: cyclin D3.1 protein [Lagenaria siceraria]
  misc_feature (1)..(315): NCBI GI NO: 6434199 NR Description: CycD3;2 [Lycopersicon esculentum]
  misc_feature (7)..(337): NCBI GI NO: 33517434 NR Description: cyclin D3-1 [Euphorbia esula]
MAAFAALFDPLYCPEEHLDLYRDEPGEGADEQWPGQHGQQEPAVLDDELPALFEAHRAKEGVVLAEDGGYGGAAGREAAVGWVSRAAARLGFSALTAALAAAYLDRCFLPGGALRLGDQPWMARLAAVTCFALAAKVEETRVPPLLDLQLYAAADAADPYVFEAKTVRRMELLVLSALGWRMHPVTPFSYLQPVLADAATRLRSCEGVLLAVMADWRWPRHRPSAWAAAALLITAAAGDGDTELLALINAPEDKTAECAKIISEVTGMSFLACDVGVSAGNKRKHAAAQLYSPPPSPSGVIGALSCFSCESSTSATAMAAAVGPWAPSASVSVSSSPEPPGRAPKRAAAASASASASAGVAPPVQVPHQLPPDEESRGAWPSTCAA

SEQ ID NO: 41301 - protein, 265 aa, Zea mays subsp. mays
  peptide (1)..(265): Ceres Seq. ID no. 12418178
  misc_feature (1)..(62): Pfam Name: Pfam Description:  Cyclin, N-terminal domain
  misc_feature (1)..(218): NCBI GI NO: 4160302 NR Description: cyclin D3.2 protein [Nicotiana tabacum]
  misc_feature (1)..(217): NCBI GI NO: 6448482 NR Description: cyclin D3a [Antirrhinum majus]
  misc_feature (1)..(236): NCBI GI NO: 27435851 NR Description: cyclin D [Populus tremula x Populus tremuloides]
  misc_feature (1)..(218): NCBI GI NO: 5679622 NR Description: cyclin D3.1 [Lycopersicon esculentum]
  misc_feature (1)..(216): NCBI GI NO: 3915637 NR Description: Cyclin delta-3
  misc_feature (1)..(216): NCBI GI NO: 15235254 NR Description: Cyclin D3;1; protein id: At4g34160.1
  misc_feature (1)..(194): NCBI GI NO: 4160300 NR Description: cyclin D3.1 protein [Nicotiana tabacum]
  misc_feature (1)..(218): NCBI GI NO: 21745138 NR Description: cyclin D3.1 protein [Lagenaria siceraria]
  misc_feature (1)..(194): NCBI GI NO: 6434199 NR Description: CycD3;2 [Lycopersicon esculentum]
  misc_feature (1)..(216): NCBI GI NO: 33517434 NR Description: cyclin D3-1 [Euphorbia esula]
MARLAAVTCFALAAKVEETRVPPLLDLQLYAAADAADPYVFEAKTVRRMELLVLSALGWRMHPVTPFSYLQPVLADAATRLRSCEGVLLAVMADWRWPRHRPSAWAAAALLITAAAGDGDTELLALINAPEDKTAECAKIISEVTGMSFLACDVGVSAGNKRKHAAAQLYSPPPSPSGVIGALSCFSCESSTSATAMAAAVGPWAPSASVSVSSSPEPPGRAPKRAAAASASASASAGVAPPVQVPHQLPPDEESRGAWPSTCAA

SEQ ID NO: 41302 - protein, 217 aa, Zea mays subsp. mays
  peptide (1)..(217): Ceres Seq. ID no. 12418179
  misc_feature (16)..(143): Pfam Name: Pfam Description:  Cyclin, C-terminal domain
  misc_feature (1)..(170): NCBI GI NO: 4160302 NR Description: cyclin D3.2 protein [Nicotiana tabacum]
  misc_feature (1)..(169): NCBI GI NO: 6448482 NR Description: cyclin D3a [Antirrhinum majus]
  misc_feature (1)..(188): NCBI GI NO: 27435851 NR Description: cyclin D [Populus tremula x Populus tremuloides]
  misc_feature (1)..(170): NCBI GI NO: 5679622 NR Description: cyclin D3.1 [Lycopersicon esculentum]
  misc_feature (1)..(168): NCBI GI NO: 3915637 NR Description: Cyclin delta-3
  misc_feature (1)..(168): NCBI GI NO: 15235254 NR Description: Cyclin D3;1; protein id: At4g34160.1
  misc_feature (1)..(146): NCBI GI NO: 4160300 NR Description: cyclin D3.1 protein [Nicotiana tabacum]
  misc_feature (1)..(170): NCBI GI NO: 21745138 NR Description: cyclin D3.1 protein [Lagenaria siceraria]
  misc_feature (1)..(146): NCBI GI NO: 6434199 NR Description: CycD3;2 [Lycopersicon esculentum]
  misc_feature (1)..(168): NCBI GI NO: 33517434 NR Description: cyclin D3-1 [Euphorbia esula]
MELLVLSALGWRMHPVTPFSYLQPVLADAATRLRSCEGVLLAVMADWRWPRHRPSAWAAAALLITAAAGDGDTELLALINAPEDKTAECAKIISEVTGMSFLACDVGVSAGNKRKHAAAQLYSPPPSPSGVIGALSCFSCESSTSATAMAAAVGPWAPSASVSVSSSPEPPGRAPKRAAAASASASASAGVAPPVQVPHQLPPDEESRGAWPSTCAA

SEQ ID NO: 41303 - DNA, 1973 bp, Zea mays subsp. mays
  misc_feature (1)..(1973): Ceres Seq. ID no. 15179312
agcatcgattaccatttccatgtcttgtgcatcttcggattctacccttcccatgctgtgtgtggcctccattcaaatcttttttcaaattggcaaaaaaaaaacactatttatgttgaaacgccttccaaattattaagggcaggcagaccttacttgttttatggctagaaataatgagggtcatctccagctgccagagatggatcatattcaacccaagaacaccccgcacaatgaaccactgcctctaggccagaagcttatgctgcatcatggaagtgatgcaccccttagaattggtcattcaagtcatgagaatatgagacttagatcaaatgatcttccacctttaagtcacactgtgcaaactcaaggttatagagttgggaacccaggagcctcgcatactccttttgttcattgtcatgctggaagttccagtagtcatttaccagaacctgctgtgaattatccacataggtcggaggaaggctttgctccagtgggttcccatatggacaacagaagggctgcaacgaagcgaaaagatcctattgtgcaccctgctgggatcagtgctactggttattatgttggaagttcttccaatactcagctatctaactctgtacagccaaatactgctccactttctgagcccttacttcgtcaaatacctttaagcattgaccgaagtggttgggatggcctacacttaattcatcaagaaggatttcagaggaatgtgagagcatgccagcgccacagtcataatatttcattacagcccagatcagcttcaacctacccactaaacagtgttcatgtgccgtcatttggttcaactacaagtgcttccttaagtatgtcagtggaaaggaaccaagcatctgtttctgtgcaaacaagaaatgtaccatcaggtgcaccaggtatcactagcaggtccctgacaaggagggcttactatcctgtggttggaagtagcaactcaagcgttgatgccgttccaactatccgtggatcatctggcgcagcaatatttgctaatggtggctatgctcttaatgctgatgctggaactgtttctatctaccctaatccagctcctgctacttcatctggctctataaccatgcccatgcccatgctccatcagatggtcattcagagccatccacctgctacctctgcagcaacctctacatccatgtggatcgctcaaccactacctgccagaactgctgcggcttctagacatgcaagacgcgtatcagcagggcttgccaacaatggaaggtacagaagggctaggagctcttactacagccttcatccactgatgatggtagaggcagaggcggttcatgatggaccagttggtcttttacgaatcaagagcagcagccgctgacccccacagggacatgagactggacatcgacaacatgagctacgaggacctgttggctttgggagaatctatgggcaatgtcaacacaggcttggccgatgagaaaatttcgaagtgcgtgaaagaagtggtctgctgcagttccgaccagacgcaaaccgatcaagatgaccaggatgacggaagctgcgtcatctgcctggagggttacagagacaaggatatgctggggatactgaaatgcaggcacgacttccacgccggctgcatcaagaagtggctgcagacgaagaactcgtgcccggtgtgcaaagccgccgccgcctaggacgacaccagaggagcgagcaactattttgtgctcctcctcgatctattcatttttttaggctcaggtcgaattatatatgtcgttccattcttttgattccagccagtcgtgtaaataaatgccgtgtgttggttattttagttatcacttgggttacattagcccaaattctcctgttgcattgtaaacaatccagtggtgaaggcaattgatcaagtgcgttgc

SEQ ID NO: 41304 - protein, 417 aa, Zea mays subsp. mays
  peptide (1)..(417): Ceres Seq. ID no. 15179313
  misc_feature (17)..(327): NCBI GI NO: 34896014 NR Description: ESTs AU075348
  misc_feature (228)..(400): NCBI GI NO: 34896014 NR Description: ESTs AU075348
MARNNEGHLQLPEMDHIQPKNTPHNEPLPLGQKLMLHHGSDAPLRIGHSSHENMRLRSNDLPPLSHTVQTQGYRVGNPGASHTPFVHCHAGSSSSHLPEPAVNYPHRSEEGFAPVGSHMDNRRAATKRKDPIVHPAGISATGYYVGSSSNTQLSNSVQPNTAPLSEPLLRQIPLSIDRSGWDGLHLIHQEGFQRNVRACQRHSHNISLQPRSASTYPLNSVHVPSFGSTTSASLSMSVERNQASVSVQTRNVPSGAPGITSRSLTRRAYYPVVGSSNSSVDAVPTIRGSSGAAIFANGGYALNADAGTVSIYPNPAPATSSGSITMPMPMLHQMVIQSHPPATSAATSTSMWIAQPLPARTAAASRHARRVSAGLANNGRYRRARSSYYSLHPLMMVEAEAVHDGPVGLLRIKSSSR

SEQ ID NO: 41305 - protein, 404 aa, Zea mays subsp. mays
  peptide (1)..(404): Ceres Seq. ID no. 15179314
  misc_feature (4)..(314): NCBI GI NO: 34896014 NR Description: ESTs AU075348
  misc_feature (215)..(387): NCBI GI NO: 34896014 NR Description: ESTs AU075348
MDHIQPKNTPHNEPLPLGQKLMLHHGSDAPLRIGHSSHENMRLRSNDLPPLSHTVQTQGYRVGNPGASHTPFVHCHAGSSSSHLPEPAVNYPHRSEEGFAPVGSHMDNRRAATKRKDPIVHPAGISATGYYVGSSSNTQLSNSVQPNTAPLSEPLLRQIPLSIDRSGWDGLHLIHQEGFQRNVRACQRHSHNISLQPRSASTYPLNSVHVPSFGSTTSASLSMSVERNQASVSVQTRNVPSGAPGITSRSLTRRAYYPVVGSSNSSVDAVPTIRGSSGAAIFANGGYALNADAGTVSIYPNPAPATSSGSITMPMPMLHQMVIQSHPPATSAATSTSMWIAQPLPARTAAASRHARRVSAGLANNGRYRRARSSYYSLHPLMMVEAEAVHDGPVGLLRIKSSSR

SEQ ID NO: 41306 - protein, 383 aa, Zea mays subsp. mays
  peptide (1)..(383): Ceres Seq. ID no. 15179315
  misc_feature (1)..(293): NCBI GI NO: 34896014 NR Description: ESTs AU075348
  misc_feature (194)..(366): NCBI GI NO: 34896014 NR Description: ESTs AU075348
MLHHGSDAPLRIGHSSHENMRLRSNDLPPLSHTVQTQGYRVGNPGASHTPFVHCHAGSSSSHLPEPAVNYPHRSEEGFAPVGSHMDNRRAATKRKDPIVHPAGISATGYYVGSSSNTQLSNSVQPNTAPLSEPLLRQIPLSIDRSGWDGLHLIHQEGFQRNVRACQRHSHNISLQPRSASTYPLNSVHVPSFGSTTSASLSMSVERNQASVSVQTRNVPSGAPGITSRSLTRRAYYPVVGSSNSSVDAVPTIRGSSGAAIFANGGYALNADAGTVSIYPNPAPATSSGSITMPMPMLHQMVIQSHPPATSAATSTSMWIAQPLPARTAAASRHARRVSAGLANNGRYRRARSSYYSLHPLMMVEAEAVHDGPVGLLRIKSSSR

SEQ ID NO: 41307 - DNA, 1485 bp, Zea mays subsp. mays
  misc_feature (1)..(1485): Ceres Seq. ID no. 13496204
tagaacatcctaatcaaaaaaaaagctatcgcttatcatgctaggctaggcagctttgttgagaaggagcacgggggaagcccggcaagatcactacacgtggcatgtatgtccaaaactccaaatgccgagtagacagtggcggcggtagagagcgctgttaccttgcggggtgacgggggcaccttcttcggcgcggctgcagctgcagcatccgccgccgcgccggacgcggaggccgtgctggcgtaccgctcgggcgccgcgccgcgccgcggaaagccgcgaaggagggcgttgcggagggtgcgtcgccacgcgagtgcggtggaagatgacatcgggaacgcgaggggagaccaggcgcgggaagggcgggaggactgtgaagagcgcgaggagggcagcggcggcggcggcggcgctgatgctgatgctggtgcaggggctgatgagccggattcccgttcggcgtggccgcgtggggagcaagcagaagtgcagaactgcacaaggagagggcccacataaccatttctatgatattgcgcgtgtctcagtgtctcggcccagtttttcatgggctgacccggttatgtggccttgttagttttcgcctaatttcaaataacagcaatttcttagtggcccgtacactctgcagcagtgcggtgcgggcgtgcggcctccctttttttctccagttcctccggcggcggcgtgcttggcggtgcgccaggtgcccagatctccaccatcttagtcgccggcgacgagcatcaccaggttcccgatgaccatggcgcagcgcacgatgtgcctgcttcggcggtccattgggtttacagcgccgcaggcacagagagccctgagtaccactgccgcaccagcggcggagggtgcggccgtggctgaagctacggcgaaggaggcgaagaggaggaggaagaatctgtttgacgtagtgcagttcctgccagagtggggcattggatacaaggttgccaagaccacctggcgtgacgtctcctatcagatcaccaagatcaacctgtacaaggatggtcggcatggaaaggcgtgggagcttcggtacaaggcaggtgtgcaagctgcagacaccccaactaggatcagcggtgttaacaaacgtgggtggaagtacataaaagaatcacagaagaaactacaagaagcccccaaagtagacgtagctgttgctgctgcctagttcgtagttacatgcatgtttgttgtaagatgattcggtaaatctttagatggctgttgccagggtgagaacagggaaccacttttttttggatcgactctatacttttttgtcgatgacgactgaacctctctgcaacatgtccagtttcttttcttttccttatggaacgaacctttaccgtaatgtactgatgcagaagaactgcgttgattgtggcgatctagttttcattcaaacgcaagccttgtttc

SEQ ID NO: 41308 - protein, 145 aa, Zea mays subsp. mays
  peptide (1)..(145): Ceres Seq. ID no. 13496205
  misc_feature (8)..(143): NCBI GI NO: 15237795 NR Description: expressed protein [Arabidopsis thaliana]
  misc_feature (8)..(143): NCBI GI NO: 18423383 NR Description: expressed protein [Arabidopsis thaliana]
MTMAQRTMCLLRRSIGFTAPQAQRALSTTAAPAAEGAAVAEATAKEAKRRRKNLFDVVQFLPEWGIGYKVAKTTWRDVSYQITKINLYKDGRHGKAWELRYKAGVQAADTPTRISGVNKRGWKYIKESQKKLQEAPKVDVAVAAA

SEQ ID NO: 41309 - protein, 143 aa, Zea mays subsp. mays
  peptide (1)..(143): Ceres Seq. ID no. 13496206
  misc_feature (6)..(141): NCBI GI NO: 15237795 NR Description: expressed protein [Arabidopsis thaliana]
  misc_feature (6)..(141): NCBI GI NO: 18423383 NR Description: expressed protein [Arabidopsis thaliana]
MAQRTMCLLRRSIGFTAPQAQRALSTTAAPAAEGAAVAEATAKEAKRRRKNLFDVVQFLPEWGIGYKVAKTTWRDVSYQITKINLYKDGRHGKAWELRYKAGVQAADTPTRISGVNKRGWKYIKESQKKLQEAPKVDVAVAAA

SEQ ID NO: 41310 - protein, 138 aa, Zea mays subsp. mays
  peptide (1)..(138): Ceres Seq. ID no. 13496207
  misc_feature (1)..(136): NCBI GI NO: 15237795 NR Description: expressed protein [Arabidopsis thaliana]
  misc_feature (1)..(136): NCBI GI NO: 18423383 NR Description: expressed protein [Arabidopsis thaliana]
MCLLRRSIGFTAPQAQRALSTTAAPAAEGAAVAEATAKEAKRRRKNLFDVVQFLPEWGIGYKVAKTTWRDVSYQITKINLYKDGRHGKAWELRYKAGVQAADTPTRISGVNKRGWKYIKESQKKLQEAPKVDVAVAAA

SEQ ID NO: 41311 - DNA, 1617 bp, Zea mays subsp. mays
  misc_feature (1)..(1617): Ceres Seq. ID no. 12375523
gcacgagaccattacctagaacatcctaatcgaaaaatggatggtggagcatgaataatttgctgaggcccccctttgagcagcagcaccacgcttctcttttcatgccgtccacaaccaccagcagcagcaccgccgccgccgcgccctcttcttcttcgtcgtcgtcgccgcctctccaatccttctcctctctgctgctctcgaaccactacccgctgcctaccaccaccagcacgtcgccgtggcagcacgacaccagcatcacaagtagccatggccagccggattcttggagccagctcatacacaaggaaagccagcagatggcgtttccaactacgatttgttcggaatccggaggcggcggcagcagctacgtcgtctacggtgccgcagcggctagccatgggagcagcacaagtgatgtcgagatccagttgccatggggaagcagcagcgtactccagcagcagcagaaagcgtcctctcctaggtcttcttccagaaccacagcgacgacgacctctcccggaagcaacatgctggagttctccaacaacagtagcagttcaccacgtgagtgcatcagtacagtatctggatcagctttcaagaaggctaggacccaagaaccctccccggctcaatctactgtgaaggtgaggaaggagaagctaggggatcgaataactgctctccaccagcttgtctccccgtttggaaagactgacacagcgtctgtactccttgaagccattgggtacatcagattcctccatagtcaaattgaggctctgagctccccgtacgtgggcggcagcaatggaggtgggggcggctccaagcagaatcagcagctccacgaggctagtgcgcagagagaaagcaggcacagcatatttccagaagaccctggccagctcctgcatgacagcagcgcaataaagaaacgggccggactgcagcctgatggtgagcaggatgaagaaagctgtgatgaagagaagaagaaggatctgagaagcaggggtctgtgcctcgtcccggtgagctgcacgctggacgtgggtgtggacgtggtcgctggccccgcagactactgggcggcagctgcgccggctttcggcatggggttcggtgcgtagatgatgctggccaggacgtacgatcgatgctgtgaggaacacttgtgtgtgtctgtgtgcgccatatgcatgtatgggctgcacctgcatgcatagcatcaggagcagccatcctggtggaagctggagaatgctcaagaaggctggctcctcttgatgctatatatgcgtatggtatatggtgcacacaccgacaatgcatgcatgggcatatattatatagctacagagacgctgagagtatatgacttgcgtttctgtgtttgtgtgtacgtgatgagatcttgtctagctagctagagcgagatcaaacaatttgggtgccatggagaggggcgctatagctgcagatatttaattgttaaggctaggagtactgcgcgcggatctgtaagcaatgcaactcttttaagtcttcgtcattgaggcgtcactgtgtgctatatatatatgcatggccgaaatgtgc

SEQ ID NO: 41312 - protein, 365 aa, Zea mays subsp. mays
  peptide (1)..(365): Ceres Seq. ID no. 12375524
  misc_feature (204)..(244): Pfam Name: Pfam Description:  Helix-loop-helix DNA-binding domain
  misc_feature (2)..(360): NCBI GI NO: 15233452 NR Description: putative protein; protein id: At4g29100
  misc_feature (146)..(355): NCBI GI NO: 33111977 NR Description: putative bHLH133 transcription factor
  misc_feature (162)..(353): NCBI GI NO: 11045087 NR Description: putative protein [Brassica napus]
  misc_feature (158)..(281): NCBI GI NO: 15217667 NR Description: hypothetical protein; protein id: At1g27660.1
  misc_feature (311)..(362): NCBI GI NO: 15217667 NR Description: hypothetical protein; protein id: At1g27660.1
  misc_feature (189)..(262): NCBI GI NO: 18402256 NR Description: expressed protein; protein id: At3g19500
  misc_feature (189)..(262): NCBI GI NO: 21536756 NR Description: unknown [Arabidopsis thaliana]
  misc_feature (320)..(355): NCBI GI NO: 18402256 NR Description: expressed protein; protein id: At3g19500
  misc_feature (320)..(355): NCBI GI NO: 21536756 NR Description: unknown [Arabidopsis thaliana]
  misc_feature (104)..(281): NCBI GI NO: 22093671 NR Description: similar to bHLH
MNNLLRPPFEQQHHASLFMPSTTTSSSTAAAAPSSSSSSSPPLQSFSSLLLSNHYPLPTTTSTSPWQHDTSITSSHGQPDSWSQLIHKESQQMAFPTTICSESGGGGSSYVVYGAAAASHGSSTSDVEIQLPWGSSSVLQQQQKASSPRSSSRTTATTTSPGSNMLEFSNNSSSSPRECISTVSGSAFKKARTQEPSPAQSTVKVRKEKLGDRITALHQLVSPFGKTDTASVLLEAIGYIRFLHSQIEALSSPYVGGSNGGGGGSKQNQQLHEASAQRESRHSIFPEDPGQLLHDSSAIKKRAGLQPDGEQDEESCDEEKKKDLRSRGLCLVPVSCTLDVGVDVVAGPADYWAAAAPAFGMGFGA

SEQ ID NO: 41313 - protein, 347 aa, Zea mays subsp. mays
  peptide (1)..(347): Ceres Seq. ID no. 12375525
  misc_feature (186)..(226): Pfam Name: Pfam Description:  Helix-loop-helix DNA-binding domain
  misc_feature (1)..(342): NCBI GI NO: 15233452 NR Description: putative protein; protein id: At4g29100
  misc_feature (128)..(337): NCBI GI NO: 33111977 NR Description: putative bHLH133 transcription factor
  misc_feature (144)..(335): NCBI GI NO: 11045087 NR Description: putative protein [Brassica napus]
  misc_feature (140)..(263): NCBI GI NO: 15217667 NR Description: hypothetical protein; protein id: At1g27660.1
  misc_feature (293)..(344): NCBI GI NO: 15217667 NR Description: hypothetical protein; protein id: At1g27660.1
  misc_feature (171)..(244): NCBI GI NO: 18402256 NR Description: expressed protein; protein id: At3g19500
  misc_feature (171)..(244): NCBI GI NO: 21536756 NR Description: unknown [Arabidopsis thaliana]
  misc_feature (302)..(337): NCBI GI NO: 18402256 NR Description: expressed protein; protein id: At3g19500
  misc_feature (302)..(337): NCBI GI NO: 21536756 NR Description: unknown [Arabidopsis thaliana]
  misc_feature (86)..(263): NCBI GI NO: 22093671 NR Description: similar to bHLH
MPSTTTSSSTAAAAPSSSSSSSPPLQSFSSLLLSNHYPLPTTTSTSPWQHDTSITSSHGQPDSWSQLIHKESQQMAFPTTICSESGGGGSSYVVYGAAAASHGSSTSDVEIQLPWGSSSVLQQQQKASSPRSSSRTTATTTSPGSNMLEFSNNSSSSPRECISTVSGSAFKKARTQEPSPAQSTVKVRKEKLGDRITALHQLVSPFGKTDTASVLLEAIGYIRFLHSQIEALSSPYVGGSNGGGGGSKQNQQLHEASAQRESRHSIFPEDPGQLLHDSSAIKKRAGLQPDGEQDEESCDEEKKKDLRSRGLCLVPVSCTLDVGVDVVAGPADYWAAAAPAFGMGFGA

SEQ ID NO: 41314 - protein, 273 aa, Zea mays subsp. mays
  peptide (1)..(273): Ceres Seq. ID no. 12375526
  misc_feature (112)..(152): Pfam Name: Pfam Description:  Helix-loop-helix DNA-binding domain
  misc_feature (1)..(268): NCBI GI NO: 15233452 NR Description: putative protein; protein id: At4g29100
  misc_feature (54)..(263): NCBI GI NO: 33111977 NR Description: putative bHLH133 transcription factor
  misc_feature (70)..(261): NCBI GI NO: 11045087 NR Description: putative protein [Brassica napus]
  misc_feature (66)..(189): NCBI GI NO: 15217667 NR Description: hypothetical protein; protein id: At1g27660.1
  misc_feature (219)..(270): NCBI GI NO: 15217667 NR Description: hypothetical protein; protein id: At1g27660.1
  misc_feature (97)..(170): NCBI GI NO: 18402256 NR Description: expressed protein; protein id: At3g19500
  misc_feature (97)..(170): NCBI GI NO: 21536756 NR Description: unknown [Arabidopsis thaliana]
  misc_feature (228)..(263): NCBI GI NO: 18402256 NR Description: expressed protein; protein id: At3g19500
  misc_feature (228)..(263): NCBI GI NO: 21536756 NR Description: unknown [Arabidopsis thaliana]
  misc_feature (12)..(189): NCBI GI NO: 22093671 NR Description: similar to bHLH
MAFPTTICSESGGGGSSYVVYGAAAASHGSSTSDVEIQLPWGSSSVLQQQQKASSPRSSSRTTATTTSPGSNMLEFSNNSSSSPRECISTVSGSAFKKARTQEPSPAQSTVKVRKEKLGDRITALHQLVSPFGKTDTASVLLEAIGYIRFLHSQIEALSSPYVGGSNGGGGGSKQNQQLHEASAQRESRHSIFPEDPGQLLHDSSAIKKRAGLQPDGEQDEESCDEEKKKDLRSRGLCLVPVSCTLDVGVDVVAGPADYWAAAAPAFGMGFGA

SEQ ID NO: 41315 - DNA, 1480 bp, Zea mays subsp. mays
  misc_feature (1)..(1480): Ceres Seq. ID no. 12364480
gcacgagaccattacctagaacatcctaatcgaaaagccaaattgcattgacagagaacgagagaaaaaaaaatcctaatccaccctcgccgcgagatcgccggtcgctcccatgtcgactccagccgccgctgcgaagcaatacttttgctaccaatgcaaccgcaccgtcctcatcgcggcctccgccgtcgccgccggggagctctcgtgccccgagtgccacggcaacttcctcgaggaggtcaccatccctgccccaaccttcatccagctccctttcccttttgcttccaccacgatccctaccgccagtaccgccccgcgccccgccccagcagccggcaccggcaggcccccttccttctcgtcctcctccgctgcgacctctcggtccgagccccgctacatctcctccatcctcaactccttcgtcggacccggcgaacaacccaacaggatcagcggctccagcatacgtttcgcccctggcacggccacccacaggaacgagcccgagcccttcgacccggtaatgttcttccagaattacatccaaagcctcgtggagggaggcgccaacatccaggtcctcttcgacgatgccagcgcgagcctcggctccggacccggcctagggcgcctcggcggggcaagcttcggggattacttcgtcggcccaggcttggaacaactcatcgagcagctcgccgagaacgaccccaaccgctatggcacgccgccggctgccaagtcggccctctcctcgctccccgacgtcgtcgtgactcacaccatggtcgcagctgcggagggcgctgagtgcgccgtctgcaaggaggatttctctcctggagaggtggccaagcagatgccctgtaaccacatctaccacaccgactgcatcatgccgtggcttgagcttcacaactcgtgccccatctgtcgctttgagcttcccactgacgatcctgattatgaggtgcggaagggctctaattctcagcaggctgttggtattgctgctgctgcatcagggagctctactgctgctgagggacaaatggagaggcaggagaatccaagggtggttgagaggaggttcaatgtgtcgctgccatggccattcagtggattgggagggcaaacatcgcagcaggacgggaacagtggaggcagtggtagcaactcacaaggcagtggctcgcaggatggtggcccacccagcagcaagaattgataaaaaatcagctggaggttcaccttttggcgatctgttaagaagtctgcagtatatacgtgtcaccatgactatacacctacaggaatttacagtctctgtttgttacgaaacaatcgtttgtttttcatgtagacacggcgcaaaaactgccactgcagcagaatttgcgcgctgagagagttgggacttcatgtgtagatttgttgattgatcctggtccatgaaatggtaaacccc

SEQ ID NO: 41316 - protein, 375 aa, Zea mays subsp. mays
  peptide (1)..(375): Ceres Seq. ID no. 12364481
  misc_feature (238)..(278): Pfam Name: RING finger Pfam Description: Zinc finger, C3HC4 type
  misc_feature (1)..(374): NCBI GI NO: 37535546 NR Description: putative zinc finger protein
  misc_feature (129)..(356): NCBI GI NO: 11994207 NR Description: gene_id:MPN9.20~unknown protein
  misc_feature (129)..(356): NCBI GI NO: 15231003 NR Description: unknown protein; protein id: At3g19950
  misc_feature (143)..(361): NCBI GI NO: 34903272 NR Description: unnamed protein product
  misc_feature (1)..(45): NCBI GI NO: 34903272 NR Description: unnamed protein product
  misc_feature (182)..(369): NCBI GI NO: 15241188 NR Description: putative protein; protein id: At5g56340
  misc_feature (129)..(303): NCBI GI NO: 14719329 NR Description: putative RING-H2 finger protein [Oryza sativa]
  misc_feature (1)..(83): NCBI GI NO: 14719329 NR Description: putative RING-H2 finger protein [Oryza sativa]
  misc_feature (149)..(353): NCBI GI NO: 18405411 NR Description: expressed protein; protein id: At1g55530
  misc_feature (135)..(363): NCBI GI NO: 18405518 NR Description: expressed protein; protein id: At2g40830
MSTPAAAAKQYFCYQCNRTVLIAASAVAAGELSCPECHGNFLEEVTIPAPTFIQLPFPFASTTIPTASTAPRPAPAAGTGRPPSFSSSSAATSRSEPRYISSILNSFVGPGEQPNRISGSSIRFAPGTATHRNEPEPFDPVMFFQNYIQSLVEGGANIQVLFDDASASLGSGPGLGRLGGASFGDYFVGPGLEQLIEQLAENDPNRYGTPPAAKSALSSLPDVVVTHTMVAAAEGAECAVCKEDFSPGEVAKQMPCNHIYHTDCIMPWLELHNSCPICRFELPTDDPDYEVRKGSNSQQAVGIAAAASGSSTAAEGQMERQENPRVVERRFNVSLPWPFSGLGGQTSQQDGNSGGSGSNSQGSGSQDGGPPSSKN

SEQ ID NO: 41317 - protein, 234 aa, Zea mays subsp. mays
  peptide (1)..(234): Ceres Seq. ID no. 12364482
  misc_feature (97)..(137): Pfam Name: RING finger Pfam Description: Zinc finger, C3HC4 type
  misc_feature (1)..(233): NCBI GI NO: 37535546 NR Description: putative zinc finger protein
  misc_feature (1)..(215): NCBI GI NO: 11994207 NR Description: gene_id:MPN9.20~unknown protein
  misc_feature (1)..(215): NCBI GI NO: 15231003 NR Description: unknown protein; protein id: At3g19950
  misc_feature (2)..(220): NCBI GI NO: 34903272 NR Description: unnamed protein product
  misc_feature (41)..(228): NCBI GI NO: 15241188 NR Description: putative protein; protein id: At5g56340
  misc_feature (1)..(162): NCBI GI NO: 14719329 NR Description: putative RING-H2 finger protein [Oryza sativa]
  misc_feature (8)..(212): NCBI GI NO: 18405411 NR Description: expressed protein; protein id: At1g55530
  misc_feature (1)..(222): NCBI GI NO: 18405518 NR Description: expressed protein; protein id: At2g40830
  misc_feature (29)..(162): NCBI GI NO: 15232595 NR Description: putative protein; protein id: At3g46620
  misc_feature (40)..(219): NCBI GI NO: 7486783 NR Description: hypothetical protein M3E9
MFFQNYIQSLVEGGANIQVLFDDASASLGSGPGLGRLGGASFGDYFVGPGLEQLIEQLAENDPNRYGTPPAAKSALSSLPDVVVTHTMVAAAEGAECAVCKEDFSPGEVAKQMPCNHIYHTDCIMPWLELHNSCPICRFELPTDDPDYEVRKGSNSQQAVGIAAAASGSSTAAEGQMERQENPRVVERRFNVSLPWPFSGLGGQTSQQDGNSGGSGSNSQGSGSQDGGPPSSKN

SEQ ID NO: 41318 - protein, 221 aa, Zea mays subsp. mays
  peptide (1)..(221): Ceres Seq. ID no. 12364483
MQPHRPHRGLRRRRRGALVPRVPRQLPRGGHHPCPNLHPAPFPFCFHHDPYRQYRPAPRPSSRHRQAPFLLVLLRCDLSVRAPLHLLHPQLLRRTRRTTQQDQRLQHTFRPWHGHPQERARALRPGNVLPELHPKPRGGRRQHPGPLRRCQREPRLRTRPRAPRRGKLRGLLRRPRLGTTHRAARRERPQPLWHAAGCQVGPLLAPRRRRDSHHGRSCGGR

SEQ ID NO: 41319 - DNA, 1617 bp, Zea mays subsp. mays; identical to SEQ ID NO: 33972
  misc_feature (1)..(1617): Ceres Seq. ID no. 13494824

SEQ ID NO: 41320 - protein, 477 aa, Zea mays subsp. mays; identical to SEQ ID NO: 33973
  peptide (1)..(477): Ceres Seq. ID no. 13494825
  misc_feature (109)..(286): Pfam Name: Pfam Description:  HSF-type DNA-binding
  misc_feature (61)..(461): NCBI GI NO: 34902282 NR Description: Putative heat shock factor 3
  misc_feature (81)..(350): NCBI GI NO: 29126355 NR Description: putative heat shock transcription factor
  misc_feature (71)..(364): NCBI GI NO: 729775 NR Description: HEAT SHOCK FACTOR PROTEIN HSF8
  misc_feature (90)..(367): NCBI GI NO: 25296101 NR Description: heat shock transcription factor HSF3
  misc_feature (90)..(367): NCBI GI NO: 27261140 NR Description: HSF3 DNA-binding domain/ VP16 activation domainfusion
  misc_feature (90)..(367): NCBI GI NO: 30686034 NR Description: heat shock transcription factor 3 (HSF3)
  misc_feature (80)..(344): NCBI GI NO: 15236631 NR Description: heat shock transcription factor 1 (HSF1)
  misc_feature (80)..(344): NCBI GI NO: 429155 NR Description: heat shock factor [Arabidopsis thaliana]
  misc_feature (71)..(364): NCBI GI NO: 11386827 NR Description: Heat shock factor protein HSF8
  misc_feature (93)..(348): NCBI GI NO: 15223168 NR Description: heat shock transcription factor family

SEQ ID NO: 41321 - protein, 417 aa, Zea mays subsp. mays; identical to SEQ ID NO: 33974
  peptide (1)..(417): Ceres Seq. ID no. 13494826
  misc_feature (49)..(226): Pfam Name: Pfam Description:  HSF-type DNA-binding
  misc_feature (1)..(401): NCBI GI NO: 34902282 NR Description: Putative heat shock factor 3
  misc_feature (21)..(290): NCBI GI NO: 29126355 NR Description: putative heat shock transcription factor
  misc_feature (11)..(304): NCBI GI NO: 729775 NR Description: HEAT SHOCK FACTOR PROTEIN HSF8
  misc_feature (30)..(307): NCBI GI NO: 25296101 NR Description: heat shock transcription factor HSF3
  misc_feature (30)..(307): NCBI GI NO: 30686034 NR Description: heat shock transcription factor 3 (HSF3)
  misc_feature (30)..(307): NCBI GI NO: 27261140 NR Description: HSF3 DNA-binding domain/ VP16 activation domainfusion
  misc_feature (20)..(284): NCBI GI NO: 15236631 NR Description: heat shock transcription factor 1 (HSF1)
  misc_feature (20)..(284): NCBI GI NO: 429155 NR Description: heat shock factor [Arabidopsis thaliana]
  misc_feature (11)..(304): NCBI GI NO: 11386827 NR Description: Heat shock factor protein HSF8
  misc_feature (33)..(288): NCBI GI NO: 15223168 NR Description: heat shock transcription factor family

SEQ ID NO: 41322 - protein, 360 aa, Zea mays subsp. mays; identical to SEQ ID NO: 33975
  peptide (1)..(360): Ceres Seq. ID no. 13494827
  misc_feature (1)..(169): Pfam Name: Pfam Description:  HSF-type DNA-binding
  misc_feature (1)..(344): NCBI GI NO: 34902282 NR Description: Putative heat shock factor 3
  misc_feature (1)..(233): NCBI GI NO: 29126355 NR Description: putative heat shock transcription factor
  misc_feature (1)..(247): NCBI GI NO: 729775 NR Description: HEAT SHOCK FACTOR PROTEIN HSF8
  misc_feature (1)..(250): NCBI GI NO: 25296101 NR Description: heat shock transcription factor HSF3
  misc_feature (1)..(250): NCBI GI NO: 27261140 NR Description: HSF3 DNA-binding domain/ VP16 activation domainfusion
  misc_feature (1)..(250): NCBI GI NO: 30686034 NR Description: heat shock transcription factor 3 (HSF3)
  misc_feature (1)..(227): NCBI GI NO: 15236631 NR Description: heat shock transcription factor 1 (HSF1)
  misc_feature (1)..(227): NCBI GI NO: 429155 NR Description: heat shock factor [Arabidopsis thaliana]
  misc_feature (1)..(247): NCBI GI NO: 11386827 NR Description: Heat shock factor protein HSF8
  misc_feature (1)..(231): NCBI GI NO: 15223168 NR Description: heat shock transcription factor family

SEQ ID NO: 41323 - DNA, 1617 bp, Zea mays subsp. mays
  misc_feature (1)..(1617): Ceres Seq. ID no. 12383525
  misc_feature (1614)..(1614): n is a, c, t, g, unknown, or other
gcacgagaccattacctagaacatcctaatcgaaaaatcgaaaagccgcacccgcacgccagaaacagctctcgcgttgcttccgcacgccgcccatggcgagcctgtcgtcgccgagtctcctctcttccttcctcggcgaccgcctcgcactctccactaggcctctccttctccgctccgctgtcccaggcagcaggcggctggcgtatcaagcaacgagaacgctatgcaacttggtggatatcctatttaacaggagaaatcaggatgatgcaccagaaaacaaccctagacgcctgcgtcctgggaaagtatctccacgccttagtgttcccaatcatatacaacggcctccatatgtcaattctcgtcaacaacgacctggtatgaataatggacctgaaatacatgatgagaacgggatcgagtgcatgagagcttctggaaagcttgctgcacaggttttgaaatttgctgggactcttgtaaaggcataacgactgatgaaattgataaagcagtgcaccaaatgataattgataatggagcatatccttcacctcttggttattgtggatacccaaagagtgtctgcacttcagtgaatgaatgcatctgtcatgggattccggattctcgtccccttgaggatggagatatcatcaatattgatgttactgtctacctcaatggctaccatggtgatacatctgctacatttctttgcggtgatgttgatgacgaagctaagaaattagttaaggtgacaagagaatgtctcgacaaggctatatcgatttgttcacctggggtggagatcaaacaaattggtagaactatacagtatgtaatttctgagtaaccaagcttttaaacagatgcacatatttttttattatctttatcttaaaaaacaacattcagtttatcgataagctgtattgtcttaatttgtatgcgtaacagatctggtaatcaaaacgaactcttgttccaactactatacttacgacatttaatctttgaagggatcatgcagacaagtttaagtttggtgtagttagacagtttgttggccatggggttggcaaagtttttcatgctgagcctgttgtgcttcatttcagtgagttccccactttaacgaaaacatctttttattaattgctgtcttgcctcccggctatctcaaggttctggttgcactctgcaccatattaggatgtgatatctgtgccaatgacttcgaaatttgcaggaaacaatgaatggggacgtatgatgttgaatcaaacatttactatagagcccatgctaaccatagggagcatcaaccctgtcatgtggtccgatgactggaccgcagtgacagaagacggcagcttgtcagcacagtttgagcacacgatactcattaccgaagatggccctgaaatactgacacagtgttaatggaaggccaaataacaaagaacaatcgttagtcagctggcaagatcctgcatttctttttggggactaattggtccaacctaaactctgatgcaaaatggcaaactcacattgtaatctcggttcatcggtacaacgatatatgtatagaaattgtantag

SEQ ID NO: 41324 - protein, 134 aa, Zea mays subsp. mays
  peptide (1)..(134): Ceres Seq. ID no. 12383526
  misc_feature (1)..(133): NCBI GI NO: 18419957 NR Description: methionyl aminopeptidase-like protein
  misc_feature (59)..(133): NCBI GI NO: 25289731 NR Description: methionyl aminopeptidase-like protein
  misc_feature (72)..(133): NCBI GI NO: 38345794 NR Description: OSJNBa0085I10.11
  misc_feature (2)..(133): NCBI GI NO: 11320956 NR Description: methionine aminopeptidase-like protein
  misc_feature (2)..(133): NCBI GI NO: 15222218 NR Description: methionine aminopeptidase I
  misc_feature (1)..(133): NCBI GI NO: 34394646 NR Description: putative methionine aminopeptidase I (MAP1)
  misc_feature (72)..(133): NCBI GI NO: 7939560 NR Description: methionine aminopeptidase-like protein
  misc_feature (72)..(133): NCBI GI NO: 11320958 NR Description: methionine aminopeptidase-like protein
  misc_feature (72)..(133): NCBI GI NO: 15230872 NR Description: methionine aminopeptidase, putative
  misc_feature (72)..(131): NCBI GI NO: 24583427 NR Description: CG5188-PA [Drosophila melanogaster]
MASLSSPSLLSSFLGDRLALSTRPLLLRSAVPGSRRLAYQATRTLCNLVDILFNRRNQDDAPENNPRRLRPGKVSPRLSVPNHIQRPPYVNSRQQRPGMNNGPEIHDENGIECMRASGKLAAQVLKFAGTLVKA

SEQ ID NO: 41325 - protein, 130 aa, Zea mays subsp. mays
  peptide (1)..(130): Ceres Seq. ID no. 12383527
ARDHYLEHPNRKIEKPHPHARNSSRVASARRPWRACRRRVSSLPSSATASHSPLGLSFSAPLSQAAGGWRIKQRERYATWWISYLTGEIRMMHQKTTLDACVLGKYLHALVFPIIYNGLHMSILVNNDLV

SEQ ID NO: 41326 - protein, 110 aa, Zea mays subsp. mays
  peptide (1)..(110): Ceres Seq. ID no. 12383528
  misc_feature (1)..(104): NCBI GI NO: 18419957 NR Description: methionyl aminopeptidase-like protein
  misc_feature (1)..(104): NCBI GI NO: 25289731 NR Description: methionyl aminopeptidase-like protein
  misc_feature (1)..(104): NCBI GI NO: 38345794 NR Description: OSJNBa0085I10.11
  misc_feature (1)..(104): NCBI GI NO: 11320956 NR Description: methionine aminopeptidase-like protein
  misc_feature (1)..(104): NCBI GI NO: 15222218 NR Description: methionine aminopeptidase I
  misc_feature (1)..(104): NCBI GI NO: 34394646 NR Description: putative methionine aminopeptidase I (MAP1)
  misc_feature (1)..(104): NCBI GI NO: 7939560 NR Description: methionine aminopeptidase-like protein
  misc_feature (1)..(104): NCBI GI NO: 11320958 NR Description: methionine aminopeptidase-like protein
  misc_feature (1)..(104): NCBI GI NO: 15230872 NR Description: methionine aminopeptidase, putative
  misc_feature (1)..(110): NCBI GI NO: 24583427 NR Description: CG5188-PA [Drosophila melanogaster]
MIIDNGAYPSPLGYCGYPKSVCTSVNECICHGIPDSRPLEDGDIINIDVTVYLNGYHGDTSATFLCGDVDDEAKKLVKVTRECLDKAISICSPGVEIKQIGRTIQYVISE

SEQ ID NO: 41327 - DNA, 2117 bp, Zea mays subsp. mays
  misc_feature (1)..(2117): Ceres Seq. ID no. 12382616
gcacgagaccattacctagaacatcctaatcgaaaacccgatttcaccgaccatttttccccatttcacagcgggcgaatatctctcatctcccccatcctctttcctgcaacaactcctacccacccgacagaaatatcctaagcgctgacccgaatacccgattcgctcctcgtccggtcgattcctgctcctaatcgctcgaatcgagtccttgccccgtgttccgtgccacaatctgggcgcttggctcccgcgagccggggttcttgggcctgggcggaggccatggacaagccggtggcgccgggcattatcaaggaggagctcctggagcagcagccgccgacgcaggacggtgtgggtggcggcggggatgcgccgcgcccgatggaggggctgcacgaggtgggtcccccgcctttcctcaccaagacgttcgaccttgtggaggacccggccaccgacgccgtcctctcctggagccgcgccggcaacagcttcatcgtctgggacccgcacgtcttcgccgacgggctgctcccgcgcctcttcaagcacagtaacttctccagcttcgtgcgccagctcaacacctatggcttcagaaggttgatcctgacaggtgggagtttgcaaatgaaggtttcctcagaggtcaaaggcacctgctgaagatgataaagagaaggaagccaccatcagctgtggcaccattgcgacagcaacgtgcccctgcttcttgcctggaggttggtgagtttggatttgaggaggagattgataggctgaagcgtgacaagaacattttaatcacagaagtagtaaaactaaggcaggagcagcaaagtactaaagatcatgtgagagccatggaggaaaggctacgagtggctgaacagaagcaggtacagatgatggggttcttggcaagagcaatgcggaacccagagttcttcctcagttggcccagcagcaagacaagaggaaggagctcgaggataccatctcaaagaaaagaaggcggcccattgacaacacaccattctacagtgatggggaaagcgaacagcttgattcacagttgaaaatgttcgagtcaggtgttctcaatgggctcaatgaacctgagctggagaatttagcagtgaacattcaggagcttgggaagggaagcatagatgatgggaacttgactcaagttagtgaccagtcagagctgaacgacgacttctgggcagagcttttggtcgaagattttggagacaaggcaggacagccagagttggagggaagaactgaagacgtgaatgaccttgctcaacaactggggtatctgagttcttctagcccaaaatagagccagttcctaatggttgcccccacaatcactggtgctttccctaccctactgttgcagaccatcctgatcaaaccggtacttttcaaattcaattcaatgacacaaacctgttaaaatctggtaacattttcattccatttcttttatattgctggattagccaggaatgatgatggatctggcagacaaggtttgacgacccatccttctaaccatatccattatgtttgcgcagttgcatcttcagatttgccctcatcttttcttcttcttcttctgaaacattctaaattgctccttatccagttgactggtggtggagaggtgttcatactgaaggcgtgctgtggagaggtcactgccttgacgttgaaggcttagcgctgtactctgctgtgggagttacgtgtggggtgttggctaaatgtctcttccggcgtcttctggcaaaatgatctcgtggacggtgactggcaaagatgcctaggggccaacgtatacgtacacagctgttatcagatcttgttcaaagtcattgcgcggttttgacggtgctatgtatcgatcagggttctggccttctggggttgggttgtagaattgactggctgatctagtgttctccatgtatgactggtgtaaccttaaaacaccctcagcttgttgttgaactgtgacaagcatctcgtttttttgttgtactccattttcatcatcattgtacatcaaattgctgaattatgaacagatccct

SEQ ID NO: 41328 - protein, 136 aa, Zea mays subsp. mays
  peptide (1)..(136): Ceres Seq. ID no. 12382617
  misc_feature (1)..(84): Pfam Name: Pfam Description:  HSF-type DNA-binding
  misc_feature (1)..(119): NCBI GI NO: 37534406 NR Description: putative auxin-induced protein
  misc_feature (1)..(93): NCBI GI NO: 28971956 NR Description: putative heat shock transcription factor
  misc_feature (1)..(93): NCBI GI NO: 33087081 NR Description: heat stress protein
  misc_feature (1)..(113): NCBI GI NO: 34902614 NR Description: Putative heat shock protein
  misc_feature (1)..(119): NCBI GI NO: 15228865 NR Description: putative heat shock protein; protein id:At3g22830
  misc_feature (1)..(93): NCBI GI NO: 15225255 NR Description: putative heat shock transcription factor
  misc_feature (1)..(93): NCBI GI NO: 30017583 NR Description: putative heat shock factor
  misc_feature (1)..(136): NCBI GI NO: 729774 NR Description: HEAT SHOCK FACTOR PROTEIN HSF30
  misc_feature (1)..(118): NCBI GI NO: 29126355 NR Description: putative heat shock transcription factor
  misc_feature (1)..(136): NCBI GI NO: 429155 NR Description: heat shock factor [Arabidopsis thaliana]
MIKRRKPPSAVAPLRQQRAPASCLEVGEFGFEEEIDRLKRDKNILITEVVKLRQEQQSTKDHVRAMEERLRVAEQKQVQMMGFLARAMRNPEFFLSWPSSKTRGRSSRIPSQRKEGGPLTTHHSTVMGKANSLIHS

SEQ ID NO: 41329 - protein, 128 aa, Zea mays subsp. mays
  peptide (1)..(128): Ceres Seq. ID no. 12382618
  misc_feature (44)..(104): Pfam Name: Pfam Description:  HSF-type DNA-binding
  misc_feature (1)..(109): NCBI GI NO: 37534406 NR Description: putative auxin-induced protein
  misc_feature (22)..(109): NCBI GI NO: 28971956 NR Description: putative heat shock transcription factor
  misc_feature (22)..(109): NCBI GI NO: 33087081 NR Description: heat stress protein
  misc_feature (1)..(104): NCBI GI NO: 34902614 NR Description: Putative heat shock protein
  misc_feature (32)..(109): NCBI GI NO: 15228865 NR Description: putative heat shock protein; protein id:At3g22830
  misc_feature (27)..(109): NCBI GI NO: 15225255 NR Description: putative heat shock transcription factor
  misc_feature (30)..(109): NCBI GI NO: 30017583 NR Description: putative heat shock factor
  misc_feature (22)..(109): NCBI GI NO: 729774 NR Description: HEAT SHOCK FACTOR PROTEIN HSF30
  misc_feature (43)..(109): NCBI GI NO: 29126355 NR Description: putative heat shock transcription factor
  misc_feature (23)..(109): NCBI GI NO: 429155 NR Description: heat shock factor [Arabidopsis thaliana]
MDKPVAPGIIKEELLEQQPPTQDGVGGGGDAPRPMEGLHEVGPPPFLTKTFDLVEDPATDAVLSWSRAGNSFIVWDPHVFADGLLPRLFKHSNFSSFVRQLNTYGFRRLILTGGSLQMKVSSEVKGTC

SEQ ID NO: 41330 - protein, 94 aa, Zea mays subsp. mays
  peptide (1)..(94): Ceres Seq. ID no. 12382619
  misc_feature (10)..(70): Pfam Name: Pfam Description:  HSF-type DNA-binding
  misc_feature (1)..(75): NCBI GI NO: 37534406 NR Description: putative auxin-induced protein
  misc_feature (1)..(75): NCBI GI NO: 28971956 NR Description: putative heat shock transcription factor
  misc_feature (1)..(75): NCBI GI NO: 33087081 NR Description: heat stress protein
  misc_feature (1)..(70): NCBI GI NO: 34902614 NR Description: Putative heat shock protein
  misc_feature (1)..(75): NCBI GI NO: 15228865 NR Description: putative heat shock protein; protein id:At3g22830
  misc_feature (1)..(75): NCBI GI NO: 15225255 NR Description: putative heat shock transcription factor
  misc_feature (1)..(75): NCBI GI NO: 30017583 NR Description: putative heat shock factor
  misc_feature (1)..(75): NCBI GI NO: 729774 NR Description: HEAT SHOCK FACTOR PROTEIN HSF30
  misc_feature (9)..(75): NCBI GI NO: 29126355 NR Description: putative heat shock transcription factor
  misc_feature (1)..(75): NCBI GI NO: 429155 NR Description: heat shock factor [Arabidopsis thaliana]
MEGLHEVGPPPFLTKTFDLVEDPATDAVLSWSRAGNSFIVWDPHVFADGLLPRLFKHSNFSSFVRQLNTYGFRRLILTGGSLQMKVSSEVKGTC

SEQ ID NO: 41331 - DNA, 466 bp, Zea mays subsp. mays
  misc_feature (1)..(466): Ceres Seq. ID no. 11415029
attttggctcctcactgccgcgccgccaccccctacaggtaaggaagaggagggcaggatgtcgcaccgtaagttcgagcacccgaggcacggctccctcggcttccttcccaggaagcgctcctcccgtcaccgcggcaaggtgaagtcattccctagggatgaccccaagaagccttgccatctcactgccttccttggctacaaggctggcatgactcacattgtccgtgaggttgagaagccaggatccaaactccataagaaggaaacttgtgaggctgttaccatcattgaaacycycttgtcaaaaadcggctcgtggcatatgtgaagactcctcgtggcctccgcacactcaactctgtttgggsccaacatcttagtgaagaagtgaggagaargttctacaagaactggtgcaagagcaagaagaargctttcacaaagtatgctctcaaatatg

SEQ ID NO: 41332 - protein, 110 aa, Zea mays subsp. mays
  peptide (1)..(110): Ceres Seq. ID no. 11415030
  misc_feature (20)..(100): NCBI GI NO: 33526877 NR Description: ribosomal protein L3 [Triticum aestivum]
  misc_feature (20)..(100): NCBI GI NO: 33526886 NR Description: ribosomal protein L3 [Triticum aestivum]
  misc_feature (20)..(100): NCBI GI NO: 548770 NR Description: 60S RIBOSOMAL PROTEIN L3
  misc_feature (20)..(100): NCBI GI NO: 34105768 NR Description: ribosomal protein L3 [Triticum aestivum]
  misc_feature (20)..(100): NCBI GI NO: 38327504 NR Description: ribosomal protein L3 [Lycopersicon esculentum]
  misc_feature (20)..(100): NCBI GI NO: 6688812 NR Description: L3 Ribosomal protein
  misc_feature (20)..(100): NCBI GI NO: 81657 NR Description: ribosomal protein L3
  misc_feature (20)..(100): NCBI GI NO: 15218306 NR Description: ribosomal protein; protein id: At1g43170
  misc_feature (20)..(100): NCBI GI NO: 81658 NR Description: ribosomal protein L3
  misc_feature (20)..(100): NCBI GI NO: 15220533 NR Description: ribosomal protein; protein id: At1g61580.1
  misc_feature (100)..(100): Xaa is any aa, unknown or other
  misc_feature (101)..(101): Xaa is any aa, unknown or other
  misc_feature (105)..(105): Xaa is any aa, unknown or other
FWLLTAAPPPPTGKEEEGRMSHRKFEHPRHGSLGFLPRKRSSRHRGKVKSFPRDDPKKPCHLTAFLGYKAGMTHIVREVEKPGSKLHKKETCEAVTIIEXXLSKXGSWHM

SEQ ID NO: 41333 - protein, 91 aa, Zea mays subsp. mays
  peptide (1)..(91): Ceres Seq. ID no. 11415031
  misc_feature (1)..(81): NCBI GI NO: 33526877 NR Description: ribosomal protein L3 [Triticum aestivum]
  misc_feature (1)..(81): NCBI GI NO: 33526886 NR Description: ribosomal protein L3 [Triticum aestivum]
  misc_feature (1)..(81): NCBI GI NO: 548770 NR Description: 60S RIBOSOMAL PROTEIN L3
  misc_feature (1)..(81): NCBI GI NO: 34105768 NR Description: ribosomal protein L3 [Triticum aestivum]
  misc_feature (1)..(81): NCBI GI NO: 38327504 NR Description: ribosomal protein L3 [Lycopersicon esculentum]
  misc_feature (1)..(81): NCBI GI NO: 6688812 NR Description: L3 Ribosomal protein
  misc_feature (1)..(81): NCBI GI NO: 81657 NR Description: ribosomal protein L3
  misc_feature (1)..(81): NCBI GI NO: 15218306 NR Description: ribosomal protein; protein id: At1g43170
  misc_feature (1)..(81): NCBI GI NO: 81658 NR Description: ribosomal protein L3
  misc_feature (1)..(81): NCBI GI NO: 15220533 NR Description: ribosomal protein; protein id: At1g61580.1
  misc_feature (81)..(81): Xaa is any aa, unknown or other
  misc_feature (82)..(82): Xaa is any aa, unknown or other
  misc_feature (86)..(86): Xaa is any aa, unknown or other
MSHRKFEHPRHGSLGFLPRKRSSRHRGKVKSFPRDDPKKPCHLTAFLGYKAGMTHIVREVEKPGSKLHKKETCEAVTIIEXXLSKXGSWHM

SEQ ID NO: 41334 - DNA, 1252 bp, Zea mays subsp. mays
  misc_feature (1)..(1252): Ceres Seq. ID no. 12350354
gatatctcattggagtgcaggactcggaggcagcccatttctaggcagcgcgtctcttcgcgcaccccccaattcgaacgacggagcacgacgcacgcagagccgcagagatccgtcacactgcaagttttgaaaactgaactgtaagatggcatcagcagagctttcccgtgaggaaaatgtgtacatggcgaagctcgccgagcaggcagagaggtacgaggaaatggttgagttcatggagaaggtagcgaaaactgttgactcggaggagctcactgtggaggagcgcaacctcctgtctgttgcatacaagaacgtcattggagcccgccgtgcctcatggcgcatcatctcctccatcgagcagaaggaggagggtcgaggcaatgaggaccgtgtaacactcatcaaggactaccgtggcaagattgaaactgagctcaccaagatctgtgatggcatcctcaagcttctcgaatctcaccttgtgccgtcttccaccgctcccgagtccaaggtcttctatctcaagatgaagggtgactactacagataccttgctgagttcaagactggagctgagagaaaggacgctgctgagaacaccatggtggcatacaaggctgcccaggacattgctttggctgagcttgctccaactcaccctattaggcttggactggcactcaacttctcagtgttctactatgagattctcaactcacccgatcgcgcctgcagtcttgcaaagcaggcttttgacgaggccatctcggaactggacaccctgagcgaggagtcctacaaggacagcactttgatcatgcagctccttcatgataacttgaccctatggacttctgacatctcggaggaccctgcggaagagatcagggaggcgcccaagcacgacttgagcgaggggcagtaaagccggctttacatgcctagaagctagtacctagtgtttgctgctgtctaatgacattatgcaatgtgatctggaccctggtttcttgggtgcgacgcttgtagcagccgtcttatgattatttgtcgggaaaatttgggggctccccatatgagatgctgccgggcaagacctcgccatcccccacctcgtttcaggcgggggacgctggagcctggtccggttgggttgggaagccccttaaactgttgtcgcttgcattttaaccttttcatcgccgttcagtggtcctaaatctatggctcgtctcagtggtct

SEQ ID NO: 41335 - protein, 261 aa, Zea mays subsp. mays
  peptide (1)..(261): Ceres Seq. ID no. 12350355
  misc_feature (8)..(245): Pfam Name: Pfam Description:  14-3-3 protein
  misc_feature (1)..(261): NCBI GI NO: 1345588 NR Description: 14-3-3-LIKE PROTEIN GF14-12
  misc_feature (1)..(261): NCBI GI NO: 1345587 NR Description: 14-3-3-LIKE PROTEIN GF14-6
  misc_feature (2)..(261): NCBI GI NO: 7435021 NR Description: GF14-b protein - rice
  misc_feature (14)..(261): NCBI GI NO: 322869 NR Description: 14-3-3 protein homolog GF14-12 - maize
  misc_feature (2)..(261): NCBI GI NO: 7435015 NR Description: 14-3-3 protein - barley
  misc_feature (4)..(261): NCBI GI NO: 7271253 NR Description: 14-3-3-like protein [Oryza sativa]
  misc_feature (4)..(261): NCBI GI NO: 2492487 NR Description: 14-3-3-LIKE PROTEIN B (14-3-3B)
  misc_feature (14)..(261): NCBI GI NO: 32401388 NR Description: 14-3-3 protein [Triticum aestivum]
  misc_feature (6)..(261): NCBI GI NO: 7435022 NR Description: GF14-c protein - rice
  misc_feature (1)..(261): NCBI GI NO: 12229593 NR Description: 14-3-3-like protein
MASAELSREENVYMAKLAEQAERYEEMVEFMEKVAKTVDSEELTVEERNLLSVAYKNVIGARRASWRIISSIEQKEEGRGNEDRVTLIKDYRGKIETELTKICDGILKLLESHLVPSSTAPESKVFYLKMKGDYYRYLAEFKTGAERKDAAENTMVAYKAAQDIALAELAPTHPIRLGLALNFSVFYYEILNSPDRACSLAKQAFDEAISELDTLSEESYKDSTLIMQLLHDNLTLWTSDISEDPAEEIREAPKHDLSEGQ

SEQ ID NO: 41336 - protein, 248 aa, Zea mays subsp. mays
  peptide (1)..(248): Ceres Seq. ID no. 12350356
  misc_feature (1)..(232): Pfam Name: Pfam Description:  14-3-3 protein
  misc_feature (1)..(248): NCBI GI NO: 1345588 NR Description: 14-3-3-LIKE PROTEIN GF14-12
  misc_feature (1)..(248): NCBI GI NO: 1345587 NR Description: 14-3-3-LIKE PROTEIN GF14-6
  misc_feature (1)..(248): NCBI GI NO: 7435021 NR Description: GF14-b protein - rice
  misc_feature (1)..(248): NCBI GI NO: 322869 NR Description: 14-3-3 protein homolog GF14-12 - maize
  misc_feature (1)..(248): NCBI GI NO: 7435015 NR Description: 14-3-3 protein - barley
  misc_feature (1)..(248): NCBI GI NO: 7271253 NR Description: 14-3-3-like protein [Oryza sativa]
  misc_feature (1)..(248): NCBI GI NO: 2492487 NR Description: 14-3-3-LIKE PROTEIN B (14-3-3B)
  misc_feature (1)..(248): NCBI GI NO: 32401388 NR Description: 14-3-3 protein [Triticum aestivum]
  misc_feature (1)..(248): NCBI GI NO: 7435022 NR Description: GF14-c protein - rice
  misc_feature (1)..(248): NCBI GI NO: 12229593 NR Description: 14-3-3-like protein
MAKLAEQAERYEEMVEFMEKVAKTVDSEELTVEERNLLSVAYKNVIGARRASWRIISSIEQKEEGRGNEDRVTLIKDYRGKIETELTKICDGILKLLESHLVPSSTAPESKVFYLKMKGDYYRYLAEFKTGAERKDAAENTMVAYKAAQDIALAELAPTHPIRLGLALNFSVFYYEILNSPDRACSLAKQAFDEAISELDTLSEESYKDSTLIMQLLHDNLTLWTSDISEDPAEEIREAPKHDLSEGQ

SEQ ID NO: 41337 - protein, 235 aa, Zea mays subsp. mays
  peptide (1)..(235): Ceres Seq. ID no. 12350357
  misc_feature (1)..(219): Pfam Name: Pfam Description:  14-3-3 protein
  misc_feature (1)..(235): NCBI GI NO: 1345588 NR Description: 14-3-3-LIKE PROTEIN GF14-12
  misc_feature (1)..(235): NCBI GI NO: 1345587 NR Description: 14-3-3-LIKE PROTEIN GF14-6
  misc_feature (1)..(235): NCBI GI NO: 7435021 NR Description: GF14-b protein - rice
  misc_feature (1)..(235): NCBI GI NO: 322869 NR Description: 14-3-3 protein homolog GF14-12 - maize
  misc_feature (1)..(235): NCBI GI NO: 7435015 NR Description: 14-3-3 protein - barley
  misc_feature (1)..(235): NCBI GI NO: 7271253 NR Description: 14-3-3-like protein [Oryza sativa]
  misc_feature (1)..(235): NCBI GI NO: 2492487 NR Description: 14-3-3-LIKE PROTEIN B (14-3-3B)
  misc_feature (1)..(235): NCBI GI NO: 32401388 NR Description: 14-3-3 protein [Triticum aestivum]
  misc_feature (1)..(235): NCBI GI NO: 7435022 NR Description: GF14-c protein - rice
  misc_feature (1)..(235): NCBI GI NO: 12229593 NR Description: 14-3-3-like protein
MVEFMEKVAKTVDSEELTVEERNLLSVAYKNVIGARRASWRIISSIEQKEEGRGNEDRVTLIKDYRGKIETELTKICDGILKLLESHLVPSSTAPESKVFYLKMKGDYYRYLAEFKTGAERKDAAENTMVAYKAAQDIALAELAPTHPIRLGLALNFSVFYYEILNSPDRACSLAKQAFDEAISELDTLSEESYKDSTLIMQLLHDNLTLWTSDISEDPAEEIREAPKHDLSEGQ

SEQ ID NO: 41338 - DNA, 2763 bp, Zea mays subsp. mays
  misc_feature (1)..(2763): Ceres Seq. ID no. 13635181
ggacttgccgtcggtgctcttcaggaggaaggacgctttctctcgcaccgttctgagctgcgctggtgctcctggaaaggtactggtgcctggaggtggcagtgatgacttgctttcctccgcagagccggtcgtggacactcaacctgaagaactacagatacctgaagcagaactgactgtggagaagacatcctcctcaccaactcaaacaacatcagcagtggctgaagcaagctcaggagttgaggctgaggagaggcctgagctctcagaagtgattggagttggaggtactggtggaaccaaaattgatggtgcaggcatcaaagccaaagcaccactcgtggaggagaaaccacgagttatcccaccaccaggagatggccaacgaatatatgagattgacccaatgttggaagggtttcggggtcaccttgactaccgatacagtgaatataagagattacgtgcggctattgatcaacatgaaggtggtttggatgcattttcacgcggttacgaaaagcttggatttactcgcagcgctgaaggtatcacttacagagaatgggctcctggagcatactctgcagcattagtaggtgacttcaacaactggaacccaaatgctgatgctatggccagaaatgagtacggcgtttgggagattttcctgcctaacaatgctgatggttcccctgctattcctcatggctcacgtgtaaagatacggatggacacaccatctggtgttaaggattccattcctgcctggatcaagttttctgtgcaggctccaggtgaaataccatacaacggtatatattatgacccacctgaagaggagaaatatgtattcaaacaccctcaacctaagcggcccaagtcactgcggatatatgaatcacatgttggaatgagtagcccggaaccaaagataaatacatatgctaacttcagagatgaggtgcttccaagaattaaaaagcttggatacaatgcagtacagataatggcaatccaggaacactcttattatgcaagctttgggtaccatgttacgaatttttttgccccaagtagccgttttgggactccagaggacctaaaatctcttattgataaagcgcatgagcttggcttgctagtgcttatggatattgttcatagtcattcatcaaataataccttggatggtttgaatggtttcgatggcaccgatacacattacttccatggtggtccacgaggccatcattggatgtgggattctcgcctattcaattatgggagttgggaagttttgagatttctattgtcaaatgcgagatggtggcttgaagaatataaatttgatgggtttcgatttgatggggtgacctccatgatgtatactcaccatggattacaagtgacattcactgggaactatggcgagtattttggatttgccactgatgttgatgcagtagtttacctaatgctggtaaacgatcttattcgtgggctttatccagaagctgtatccattggcgaagatgtcagcggaatgcctacattttgtatccctgtccaagatggtggtgttggttttgattatcgtcttcatatggctgtcccagacaaatggattgaacttctgaagcaaagtgacgaatattgggaaatgggtgacatcgtgcacaccttaacaaatagaaggtggcttgaaaagtgtgtcacttattgtgaaagtcatgatcaagctcttgttggtgacaagacaattgcattctggttgatggataaggatatgtatgatttcatggctctggacaggccttcaacgcctcgcatcgatcgtgggatagcattacataaaatgattaggcttgtcacaatgggtttaggaggtgaaggctatctaaatttcatgggaaatgagtttgggcatcctgaatggatagattttccaagaggtcctcaaagtcttccaaatggctccgtcattcctgggaataacaatagctttgataaatgccgccgtagatttgaccttggagatgcagattatcttagatatcgtggtatgcaagagtttgaccaggcaatgcagcaccttgagggaaaatatgaattcatgacatctgatcactcatatgtatcacggaagcatgaggaggataaggtgatcatctttgagagaggagatttggtcttcgtgttcaacttccactggagcaatagctattttgactatcgcgttggttgtttcaagcctgggaagtacaagatcgttttagattctgacgatggccttttcggtggatttagtcggcttgatcatgatgccgagtacttcactgctgactggccgcatgacaacaggccgtgttctttctcggtctatgcacccagcagaacagccgtcgtatatgcacctgcaggtgcagaggacgaatagggccacaacagcggttgttggggaagaacttcagagggatgtgctgctggtggactgacaccactgccacgcgcgatgctgccagatgttgccctcgagaccacgtggcaggacgatcagctattcaggtggataggttagcttaccgatgagctctcgctttcgagtgactggtgaaggaaatggacctcgcacaccgcattttcgctatgcattctgaaaatgtaccgtgtggttttgtacatatggcatcagtaggcattatatcattcatctcgctgaaccaaccatttacgctatactccgtactgctgtgc

SEQ ID NO: 41339 - protein, 814 aa, Zea mays subsp. mays
  peptide (1)..(814): Ceres Seq. ID no. 13635182
  misc_feature (108)..(814): NCBI GI NO: 1771261 NR Description: 1,4-alpha-glucan branching enzyme
  misc_feature (132)..(814): NCBI GI NO: 7433857 NR Description: 1,4-alpha-glucan branching enzyme (EC 2
  misc_feature (132)..(814): NCBI GI NO: 4586236 NR Description: starch branching enzyme I [Triticum aestivum]
  misc_feature (132)..(814): NCBI GI NO: 11037532 NR Description: starch branching enyzyme 1 [Triticum aestivum]
  misc_feature (132)..(814): NCBI GI NO: 4586237 NR Description: starch branching enzyme I [Triticum aestivum]
  misc_feature (132)..(814): NCBI GI NO: 5441248 NR Description: branching enzyme 3 [Phaseolus vulgaris]
  misc_feature (132)..(806): NCBI GI NO: 283000 NR Description: 1,4-alpha-glucan branching enzyme (EC 2
  misc_feature (132)..(806): NCBI GI NO: 399544 NR Description: 1,4-alpha-glucan branching enzyme
  misc_feature (111)..(814): NCBI GI NO: 7547156 NR Description: seed starch branching enzyme [Sorghum bicolor]
  misc_feature (132)..(806): NCBI GI NO: 7433851 NR Description: 1,4-alpha-glucan branching enzyme (EC 2
DLPSVLFRRKDAFSRTVLSCAGAPGKVLVPGGGSDDLLSSAEPVVDTQPEELQIPEAELTVEKTSSSPTQTTSAVAEASSGVEAEERPELSEVIGVGGTGGTKIDGAGIKAKAPLVEEKPRVIPPPGDGQRIYEIDPMLEGFRGHLDYRYSEYKRLRAAIDQHEGGLDAFSRGYEKLGFTRSAEGITYREWAPGAYSAALVGDFNNWNPNADAMARNEYGVWEIFLPNNADGSPAIPHGSRVKIRMDTPSGVKDSIPAWIKFSVQAPGEIPYNGIYYDPPEEEKYVFKHPQPKRPKSLRIYESHVGMSSPEPKINTYANFRDEVLPRIKKLGYNAVQIMAIQEHSYYASFGYHVTNFFAPSSRFGTPEDLKSLIDKAHELGLLVLMDIVHSHSSNNTLDGLNGFDGTDTHYFHGGPRGHHWMWDSRLFNYGSWEVLRFLLSNARWWLEEYKFDGFRFDGVTSMMYTHHGLQVTFTGNYGEYFGFATDVDAVVYLMLVNDLIRGLYPEAVSIGEDVSGMPTFCIPVQDGGVGFDYRLHMAVPDKWIELLKQSDEYWEMGDIVHTLTNRRWLEKCVTYCESHDQALVGDKTIAFWLMDKDMYDFMALDRPSTPRIDRGIALHKMIRLVTMGLGGEGYLNFMGNEFGHPEWIDFPRGPQSLPNGSVIPGNNNSFDKCRRRFDLGDADYLRYRGMQEFDQAMQHLEGKYEFMTSDHSYVSRKHEEDKVIIFERGDLVFVFNFHWSNSYFDYRVGCFKPGKYKIVLDSDDGLFGGFSRLDHDAEYFTADWPHDNRPCSFSVYAPSRTAVVYAPAGAEDE

SEQ ID NO: 41340 - protein, 677 aa, Zea mays subsp. mays
  peptide (1)..(677): Ceres Seq. ID no. 13635183
  misc_feature (1)..(677): NCBI GI NO: 1771261 NR Description: 1,4-alpha-glucan branching enzyme
  misc_feature (1)..(677): NCBI GI NO: 7433857 NR Description: 1,4-alpha-glucan branching enzyme (EC 2
  misc_feature (1)..(677): NCBI GI NO: 4586236 NR Description: starch branching enzyme I [Triticum aestivum]
  misc_feature (1)..(677): NCBI GI NO: 11037532 NR Description: starch branching enyzyme 1 [Triticum aestivum]
  misc_feature (1)..(677): NCBI GI NO: 4586237 NR Description: starch branching enzyme I [Triticum aestivum]
  misc_feature (1)..(677): NCBI GI NO: 5441248 NR Description: branching enzyme 3 [Phaseolus vulgaris]
  misc_feature (1)..(669): NCBI GI NO: 283000 NR Description: 1,4-alpha-glucan branching enzyme (EC 2
  misc_feature (1)..(669): NCBI GI NO: 399544 NR Description: 1,4-alpha-glucan branching enzyme
  misc_feature (1)..(677): NCBI GI NO: 7547156 NR Description: seed starch branching enzyme [Sorghum bicolor]
  misc_feature (1)..(669): NCBI GI NO: 7433851 NR Description: 1,4-alpha-glucan branching enzyme (EC 2
MLEGFRGHLDYRYSEYKRLRAAIDQHEGGLDAFSRGYEKLGFTRSAEGITYREWAPGAYSAALVGDFNNWNPNADAMARNEYGVWEIFLPNNADGSPAIPHGSRVKIRMDTPSGVKDSIPAWIKFSVQAPGEIPYNGIYYDPPEEEKYVFKHPQPKRPKSLRIYESHVGMSSPEPKINTYANFRDEVLPRIKKLGYNAVQIMAIQEHSYYASFGYHVTNFFAPSSRFGTPEDLKSLIDKAHELGLLVLMDIVHSHSSNNTLDGLNGFDGTDTHYFHGGPRGHHWMWDSRLFNYGSWEVLRFLLSNARWWLEEYKFDGFRFDGVTSMMYTHHGLQVTFTGNYGEYFGFATDVDAVVYLMLVNDLIRGLYPEAVSIGEDVSGMPTFCIPVQDGGVGFDYRLHMAVPDKWIELLKQSDEYWEMGDIVHTLTNRRWLEKCVTYCESHDQALVGDKTIAFWLMDKDMYDFMALDRPSTPRIDRGIALHKMIRLVTMGLGGEGYLNFMGNEFGHPEWIDFPRGPQSLPNGSVIPGNNNSFDKCRRRFDLGDADYLRYRGMQEFDQAMQHLEGKYEFMTSDHSYVSRKHEEDKVIIFERGDLVFVFNFHWSNSYFDYRVGCFKPGKYKIVLDSDDGLFGGFSRLDHDAEYFTADWPHDNRPCSFSVYAPSRTAVVYAPAGAEDE

SEQ ID NO: 41341 - protein, 601 aa, Zea mays subsp. mays
  peptide (1)..(601): Ceres Seq. ID no. 13635184
  misc_feature (1)..(601): NCBI GI NO: 1771261 NR Description: 1,4-alpha-glucan branching enzyme
  misc_feature (1)..(601): NCBI GI NO: 7433857 NR Description: 1,4-alpha-glucan branching enzyme (EC 2
  misc_feature (1)..(601): NCBI GI NO: 4586236 NR Description: starch branching enzyme I [Triticum aestivum]
  misc_feature (1)..(601): NCBI GI NO: 4586237 NR Description: starch branching enzyme I [Triticum aestivum]
  misc_feature (1)..(601): NCBI GI NO: 11037532 NR Description: starch branching enyzyme 1 [Triticum aestivum]
  misc_feature (1)..(601): NCBI GI NO: 5441248 NR Description: branching enzyme 3 [Phaseolus vulgaris]
  misc_feature (1)..(593): NCBI GI NO: 283000 NR Description: 1,4-alpha-glucan branching enzyme (EC 2
  misc_feature (1)..(593): NCBI GI NO: 399544 NR Description: 1,4-alpha-glucan branching enzyme
  misc_feature (1)..(601): NCBI GI NO: 7547156 NR Description: seed starch branching enzyme [Sorghum bicolor]
  misc_feature (1)..(593): NCBI GI NO: 7433851 NR Description: 1,4-alpha-glucan branching enzyme (EC 2
MARNEYGVWEIFLPNNADGSPAIPHGSRVKIRMDTPSGVKDSIPAWIKFSVQAPGEIPYNGIYYDPPEEEKYVFKHPQPKRPKSLRIYESHVGMSSPEPKINTYANFRDEVLPRIKKLGYNAVQIMAIQEHSYYASFGYHVTNFFAPSSRFGTPEDLKSLIDKAHELGLLVLMDIVHSHSSNNTLDGLNGFDGTDTHYFHGGPRGHHWMWDSRLFNYGSWEVLRFLLSNARWWLEEYKFDGFRFDGVTSMMYTHHGLQVTFTGNYGEYFGFATDVDAVVYLMLVNDLIRGLYPEAVSIGEDVSGMPTFCIPVQDGGVGFDYRLHMAVPDKWIELLKQSDEYWEMGDIVHTLTNRRWLEKCVTYCESHDQALVGDKTIAFWLMDKDMYDFMALDRPSTPRIDRGIALHKMIRLVTMGLGGEGYLNFMGNEFGHPEWIDFPRGPQSLPNGSVIPGNNNSFDKCRRRFDLGDADYLRYRGMQEFDQAMQHLEGKYEFMTSDHSYVSRKHEEDKVIIFERGDLVFVFNFHWSNSYFDYRVGCFKPGKYKIVLDSDDGLFGGFSRLDHDAEYFTADWPHDNRPCSFSVYAPSRTAVVYAPAGAEDE

SEQ ID NO: 41342 - DNA, 847 bp, Zea mays subsp. mays
  misc_feature (1)..(847): Ceres Seq. ID no. 12379704
gagacccctctgctccaactccaatccgccgctccactccaagtcacacggaggcagccatcgcagcctcgcccgactccgcttcccctgttctttgggcatggagctgatcacaaatgtcaccgagtacgagaagctcgcgaaggagaggctgccgaagatggtgtacgactactacgcctccggcgcagaagatcagtggacgctcaaggagaaccgggaggccttctccagaattctgtttaggccacgggtactgatcgacgtctcccgtatcgacatggccacaaacgttctgggcttcagcatttccatgcctatcatgatcgctccttcagccatgcagaaaatggctcatcctgatggagagcttgccacggcaagagctgcagcctctgcaggaacaataatgacattgtcctcatggtctacttccagcgttgaagaggtcaactcagttgggccgggcatacgtttcttccagctctatgtctacaaggacaggaacatcgtacggcaactcgtgaaaagggctgagatggctggcttcaaggccattgcactcacggtagacactccaatacttggccgcagggaagctgacattaagaacaggttcgccttacctccacatctggtgttgaaaaacttccaagcgctggatcttggcacgatggacaagacaaatgattccggccttgcttcctacgttgctggtcaagttgaccgcaccctttcctggaaggacgtcaagtggctgcagacaattaccacgttgccgatcctagtgaaagggatagtgactgcagaagacactaggcttgcgatcgaatatggcgctgctggg

SEQ ID NO: 41343 - protein, 282 aa, Zea mays subsp. mays
  peptide (1)..(282): Ceres Seq. ID no. 12379705
  misc_feature (47)..(281): Pfam Name: Pfam Description:  FMN-dependent dehydrogenase
  misc_feature (34)..(281): NCBI GI NO: 38344169 NR Description: OSJNBa0053K19.8
  misc_feature (37)..(281): NCBI GI NO: 34395056 NR Description: putative glycolate oxidase
  misc_feature (34)..(281): NCBI GI NO: 15236857 NR Description: glycolate oxidase - like protein
  misc_feature (34)..(281): NCBI GI NO: 27549566 NR Description: glycolate oxidase [Zantedeschia aethiopica]
  misc_feature (34)..(281): NCBI GI NO: 228403 NR Description: glycolate oxidase
  misc_feature (34)..(281): NCBI GI NO: 1773330 NR Description: glycolate oxidase [Mesembryanthemum crystallinum]
  misc_feature (34)..(281): NCBI GI NO: 7431428 NR Description: (S)-2-hydroxy-acid oxidase (EC 1
  misc_feature (34)..(281): NCBI GI NO: 121530 NR Description:
  misc_feature (34)..(281): NCBI GI NO: 2554675 NR Description: Three-Dimensional Structure Of Glycolate OxidaseWith Bound Active-Site Inhibitors
  misc_feature (34)..(281): NCBI GI NO: 15231850 NR Description: glycolate oxidase, putative; protein id:At3g14420
RPLCSNSNPPLHSKSHGGSHRSLARLRFPCSLGMELITNVTEYEKLAKERLPKMVYDYYASGAEDQWTLKENREAFSRILFRPRVLIDVSRIDMATNVLGFSISMPIMIAPSAMQKMAHPDGELATARAAASAGTIMTLSSWSTSSVEEVNSVGPGIRFFQLYVYKDRNIVRQLVKRAEMAGFKAIALTVDTPILGRREADIKNRFALPPHLVLKNFQALDLGTMDKTNDSGLASYVAGQVDRTLSWKDVKWLQTITTLPILVKGIVTAEDTRLAIEYGAAG

SEQ ID NO: 41344 - protein, 249 aa, Zea mays subsp. mays
  peptide (1)..(249): Ceres Seq. ID no. 12379706
  misc_feature (14)..(248): Pfam Name: Pfam Description:  FMN-dependent dehydrogenase
  misc_feature (1)..(248): NCBI GI NO: 38344169 NR Description: OSJNBa0053K19.8
  misc_feature (4)..(248): NCBI GI NO: 34395056 NR Description: putative glycolate oxidase
  misc_feature (1)..(248): NCBI GI NO: 15236857 NR Description: glycolate oxidase - like protein
  misc_feature (1)..(248): NCBI GI NO: 27549566 NR Description: glycolate oxidase [Zantedeschia aethiopica]
  misc_feature (1)..(248): NCBI GI NO: 228403 NR Description: glycolate oxidase
  misc_feature (1)..(248): NCBI GI NO: 1773330 NR Description: glycolate oxidase [Mesembryanthemum crystallinum]
  misc_feature (1)..(248): NCBI GI NO: 7431428 NR Description: (S)-2-hydroxy-acid oxidase (EC 1
  misc_feature (1)..(248): NCBI GI NO: 121530 NR Description:
  misc_feature (1)..(248): NCBI GI NO: 2554675 NR Description: Three-Dimensional Structure Of Glycolate OxidaseWith Bound Active-Site Inhibitors
  misc_feature (1)..(248): NCBI GI NO: 15231850 NR Description: glycolate oxidase, putative; protein id:At3g14420
MELITNVTEYEKLAKERLPKMVYDYYASGAEDQWTLKENREAFSRILFRPRVLIDVSRIDMATNVLGFSISMPIMIAPSAMQKMAHPDGELATARAAASAGTIMTLSSWSTSSVEEVNSVGPGIRFFQLYVYKDRNIVRQLVKRAEMAGFKAIALTVDTPILGRREADIKNRFALPPHLVLKNFQALDLGTMDKTNDSGLASYVAGQVDRTLSWKDVKWLQTITTLPILVKGIVTAEDTRLAIEYGAAG

SEQ ID NO: 41345 - protein, 229 aa, Zea mays subsp. mays
  peptide (1)..(229): Ceres Seq. ID no. 12379707
  misc_feature (1)..(228): Pfam Name: Pfam Description:  FMN-dependent dehydrogenase
  misc_feature (1)..(228): NCBI GI NO: 38344169 NR Description: OSJNBa0053K19.8
  misc_feature (1)..(228): NCBI GI NO: 34395056 NR Description: putative glycolate oxidase
  misc_feature (1)..(228): NCBI GI NO: 15236857 NR Description: glycolate oxidase - like protein
  misc_feature (1)..(228): NCBI GI NO: 27549566 NR Description: glycolate oxidase [Zantedeschia aethiopica]
  misc_feature (1)..(228): NCBI GI NO: 228403 NR Description: glycolate oxidase
  misc_feature (1)..(228): NCBI GI NO: 1773330 NR Description: glycolate oxidase [Mesembryanthemum crystallinum]
  misc_feature (1)..(228): NCBI GI NO: 7431428 NR Description: (S)-2-hydroxy-acid oxidase (EC 1
  misc_feature (1)..(228): NCBI GI NO: 121530 NR Description:
  misc_feature (1)..(228): NCBI GI NO: 2554675 NR Description: Three-Dimensional Structure Of Glycolate OxidaseWith Bound Active-Site Inhibitors
  misc_feature (1)..(228): NCBI GI NO: 15231850 NR Description: glycolate oxidase, putative; protein id:At3g14420
MVYDYYASGAEDQWTLKENREAFSRILFRPRVLIDVSRIDMATNVLGFSISMPIMIAPSAMQKMAHPDGELATARAAASAGTIMTLSSWSTSSVEEVNSVGPGIRFFQLYVYKDRNIVRQLVKRAEMAGFKAIALTVDTPILGRREADIKNRFALPPHLVLKNFQALDLGTMDKTNDSGLASYVAGQVDRTLSWKDVKWLQTITTLPILVKGIVTAEDTRLAIEYGAAG

SEQ ID NO: 41346 - DNA, 475 bp, Zea mays subsp. mays
  misc_feature (1)..(475): Ceres Seq. ID no. 11404073
aawaacagcccatatttcacacagggcatttcggttcggggcatttcggtccggcgggatcgaaactytcgcacccgagagccctttatatccgctaggtttacgcgcatttttgctcctcactgccgcgccgccaccctctacagataaggaagaggaggagggcaggatgtcgcaccgtaagttcgagcacccgaggmackgctccctcggcttccttcccaggaagcgctcctcccgtcaccgcggcaaggtgaagtcattccctagggatgacgccaagaagccttgccatctcactgccttccttggctacaaggcctggcatgactcacattgtccgtgagttgagaagccaggatccaaactccataagaaggaaacttgtgaggctgttaccatcattgaaaccccttctcttgtcattgttgggctcgtggcatatgtgaagactcctcgtggcctccgcacactc

SEQ ID NO: 41347 - protein, 114 aa, Zea mays subsp. mays
  peptide (1)..(114): Ceres Seq. ID no. 11404074
  misc_feature (57)..(114): NCBI GI NO: 33526877 NR Description: ribosomal protein L3 [Triticum aestivum]
  misc_feature (57)..(114): NCBI GI NO: 33526886 NR Description: ribosomal protein L3 [Triticum aestivum]
  misc_feature (57)..(114): NCBI GI NO: 548770 NR Description: 60S RIBOSOMAL PROTEIN L3
  misc_feature (57)..(114): NCBI GI NO: 34105768 NR Description: ribosomal protein L3 [Triticum aestivum]
  misc_feature (57)..(114): NCBI GI NO: 81658 NR Description: ribosomal protein L3
  misc_feature (57)..(114): NCBI GI NO: 15220533 NR Description: ribosomal protein; protein id: At1g61580.1
  misc_feature (57)..(114): NCBI GI NO: 81657 NR Description: ribosomal protein L3
  misc_feature (57)..(114): NCBI GI NO: 15218306 NR Description: ribosomal protein; protein id: At1g43170
  misc_feature (57)..(114): NCBI GI NO: 23397228 NR Description: putative ribosomal protein [Arabidopsis thaliana]
  misc_feature (57)..(114): NCBI GI NO: 38327504 NR Description: ribosomal protein L3 [Lycopersicon esculentum]
  misc_feature (1)..(1): Xaa is any aa, unknown or other
  misc_feature (23)..(23): Xaa is any aa, unknown or other
  misc_feature (67)..(67): Xaa is any aa, unknown or other
  misc_feature (68)..(68): Xaa is any aa, unknown or other
XTAHISHRAFRFGAFRSGGIETXAPESPLYPLGLRAFLLLTAAPPPSTDKEEEEGRMSHRKFEHPRXXSLGFLPRKRSSRHRGKVKSFPRDDAKKPCHLTAFLGYKAWHDSHCP

SEQ ID NO: 41348 - protein, 58 aa, Zea mays subsp. mays
  peptide (1)..(58): Ceres Seq. ID no. 11404075
MTPRSLAISLPSLATRPGMTHIVRELRSQDPNSIRRKLVRLLPSLKPLLLSLLGSWHM

SEQ ID NO: 41349 - protein, 58 aa, Zea mays subsp. mays
  peptide (1)..(58): Ceres Seq. ID no. 11404076
  misc_feature (1)..(58): NCBI GI NO: 33526877 NR Description: ribosomal protein L3 [Triticum aestivum]
  misc_feature (1)..(58): NCBI GI NO: 33526886 NR Description: ribosomal protein L3 [Triticum aestivum]
  misc_feature (1)..(58): NCBI GI NO: 548770 NR Description: 60S RIBOSOMAL PROTEIN L3
  misc_feature (1)..(58): NCBI GI NO: 34105768 NR Description: ribosomal protein L3 [Triticum aestivum]
  misc_feature (1)..(58): NCBI GI NO: 81658 NR Description: ribosomal protein L3
  misc_feature (1)..(58): NCBI GI NO: 15220533 NR Description: ribosomal protein; protein id: At1g61580.1
  misc_feature (1)..(58): NCBI GI NO: 81657 NR Description: ribosomal protein L3
  misc_feature (1)..(58): NCBI GI NO: 23397228 NR Description: putative ribosomal protein [Arabidopsis thaliana]
  misc_feature (1)..(58): NCBI GI NO: 15218306 NR Description: ribosomal protein; protein id: At1g43170
  misc_feature (1)..(58): NCBI GI NO: 38327504 NR Description: ribosomal protein L3 [Lycopersicon esculentum]
  misc_feature (11)..(11): Xaa is any aa, unknown or other
  misc_feature (12)..(12): Xaa is any aa, unknown or other
MSHRKFEHPRXXSLGFLPRKRSSRHRGKVKSFPRDDAKKPCHLTAFLGYKAWHDSHCP

SEQ ID NO: 41350 - DNA, 666 bp, Zea mays subsp. mays
  misc_feature (1)..(666): Ceres Seq. ID no. 13666056
aatcaaaagcaaaaaccctaatcgcatctgcttccagagccccccgccgccgctgcgccctcctctcggtcctgccgtccgtcgaggtaaaaggacagcatggtgagggtcagcgtgctcaatgatgctctcaagtccatgtacaatgctgaaaagatagggaaacgtcaggtcatgatcaggccgtcatccaaggtgatcatcaagttcctgacggtcatgcagcgccatggctacattggcgagttcgagtacgtggatgaccacagagctgggaagatcgtggtggagctgaatggaagactgaataaatgtggtgttattagcccacgttttgatgtaggtgttaaggagatcgagggatggacggcgaggcttcttccatctcgccagtttggctacatcgtcctaacaacttctgctggaattatggaccatgaggaggcccgccgtaagaatgttggtggcaaggttctaggtttcttttattgaaaatgtgtttttttgagccacagatgcgtccaagaactcgtctgatgttttgaggtttgttaagactgggtgtctgagcctttgcggtttgttaagacagcgatgtgtcatgtatttcagaaattgggatttttatgagatgtacctgctagagccctgtctgtttcgattttc

SEQ ID NO: 41351 - protein, 130 aa, Zea mays subsp. mays; identical to SEQ ID NO: 36694
  peptide (1)..(130): Ceres Seq. ID no. 13666057
  misc_feature (5)..(130): Pfam Name: Pfam Description:  Ribosomal protein S8
  misc_feature (1)..(130): NCBI GI NO: 15223001 NR Description: 40S ribosomal protein S15A (RPS15aA)
  misc_feature (1)..(130): NCBI GI NO: 133793 NR Description: 40S RIBOSOMAL PROTEIN S15A (PPCB8)
  misc_feature (1)..(130): NCBI GI NO: 6683481 NR Description: wrp15a [Citrullus lanatus]
  misc_feature (1)..(130): NCBI GI NO: 15231316 NR Description: 40S ribosomal protein S15A (RPS15aD)
  misc_feature (1)..(130): NCBI GI NO: 13560779 NR Description: cytoplasmic ribosomal protein S15a [Daucus carota]
  misc_feature (1)..(130): NCBI GI NO: 28411802 NR Description: ribosomal protein S15
  misc_feature (1)..(130): NCBI GI NO: 2130985 NR Description: r-protein BnS15a [Brassica napus]
  misc_feature (1)..(130): NCBI GI NO: 15225502 NR Description: 40S ribosomal protein S15A (RPS15aC)
  misc_feature (1)..(130): NCBI GI NO: 6322271 NR Description: Homology to rat S15a; Rps22ap
  misc_feature (1)..(130): NCBI GI NO: 14326103 NR Description: ribosomal protein S22 [Candida albicans]

SEQ ID NO: 41352 - protein, 117 aa, Zea mays subsp. mays; identical to SEQ ID NO: 36695
  peptide (1)..(117): Ceres Seq. ID no. 13666058
  misc_feature (1)..(117): Pfam Name: Pfam Description:  Ribosomal protein S8
  misc_feature (1)..(117): NCBI GI NO: 15223001 NR Description: 40S ribosomal protein S15A (RPS15aA)
  misc_feature (1)..(117): NCBI GI NO: 133793 NR Description: 40S RIBOSOMAL PROTEIN S15A (PPCB8)
  misc_feature (1)..(117): NCBI GI NO: 6683481 NR Description: wrp15a [Citrullus lanatus]
  misc_feature (1)..(117): NCBI GI NO: 15231316 NR Description: 40S ribosomal protein S15A (RPS15aD)
  misc_feature (1)..(117): NCBI GI NO: 13560779 NR Description: cytoplasmic ribosomal protein S15a [Daucus carota]
  misc_feature (1)..(117): NCBI GI NO: 28411802 NR Description: ribosomal protein S15
  misc_feature (1)..(117): NCBI GI NO: 2130985 NR Description: r-protein BnS15a [Brassica napus]
  misc_feature (1)..(117): NCBI GI NO: 15225502 NR Description: 40S ribosomal protein S15A (RPS15aC)
  misc_feature (1)..(117): NCBI GI NO: 6322271 NR Description: Homology to rat S15a; Rps22ap
  misc_feature (1)..(117): NCBI GI NO: 14326103 NR Description: ribosomal protein S22 [Candida albicans]

SEQ ID NO: 41353 - protein, 105 aa, Zea mays subsp. mays; identical to SEQ ID NO: 36696
  peptide (1)..(105): Ceres Seq. ID no. 13666059
  misc_feature (1)..(105): Pfam Name: Pfam Description:  Ribosomal protein S8
  misc_feature (1)..(105): NCBI GI NO: 15223001 NR Description: 40S ribosomal protein S15A (RPS15aA)
  misc_feature (1)..(105): NCBI GI NO: 133793 NR Description: 40S RIBOSOMAL PROTEIN S15A (PPCB8)
  misc_feature (1)..(105): NCBI GI NO: 6683481 NR Description: wrp15a [Citrullus lanatus]
  misc_feature (1)..(105): NCBI GI NO: 15231316 NR Description: 40S ribosomal protein S15A (RPS15aD)
  misc_feature (1)..(105): NCBI GI NO: 13560779 NR Description: cytoplasmic ribosomal protein S15a [Daucus carota]
  misc_feature (1)..(105): NCBI GI NO: 28411802 NR Description: ribosomal protein S15
  misc_feature (1)..(105): NCBI GI NO: 2130985 NR Description: r-protein BnS15a [Brassica napus]
  misc_feature (1)..(105): NCBI GI NO: 15225502 NR Description: 40S ribosomal protein S15A (RPS15aC)
  misc_feature (1)..(105): NCBI GI NO: 6322271 NR Description: Homology to rat S15a; Rps22ap
  misc_feature (1)..(105): NCBI GI NO: 14326103 NR Description: ribosomal protein S22 [Candida albicans]

SEQ ID NO: 41354 - DNA, 1698 bp, Zea mays subsp. mays; identical to SEQ ID NO: 35446
  misc_feature (1)..(1698): Ceres Seq. ID no. 13494587

SEQ ID NO: 41355 - protein, 355 aa, Zea mays subsp. mays; identical to SEQ ID NO: 35447
  peptide (1)..(355): Ceres Seq. ID no. 13494588
  misc_feature (1)..(81): Pfam Name: Peptidase family S21 Pfam Description: Assemblin
  misc_feature (1)..(341): NCBI GI NO: 22773231 NR Description: Putative RNA-binding protein
  misc_feature (34)..(340): NCBI GI NO: 18087662 NR Description: putative RNA-binding protein [Oryza sativa]
  misc_feature (29)..(334): NCBI GI NO: 30682679 NR Description: expressed protein [Arabidopsis thaliana]
  misc_feature (29)..(334): NCBI GI NO: 25084169 NR Description: Unknown protein [Arabidopsis thaliana]
  misc_feature (29)..(334): NCBI GI NO: 30682683 NR Description: expressed protein [Arabidopsis thaliana]
  misc_feature (82)..(336): NCBI GI NO: 18405397 NR Description: expressed protein [Arabidopsis thaliana]
  misc_feature (29)..(204): NCBI GI NO: 25372787 NR Description: Rubisco subunit binding-protein beta subunit
  misc_feature (80)..(243): NCBI GI NO: 34395023 NR Description: high-glucose-regulated protein 8-like
  misc_feature (30)..(191): NCBI GI NO: 30682433 NR Description: expressed protein [Arabidopsis thaliana]
  misc_feature (30)..(191): NCBI GI NO: 30682438 NR Description: expressed protein [Arabidopsis thaliana]

SEQ ID NO: 41356 - protein, 263 aa, Zea mays subsp. mays; identical to SEQ ID NO: 35448
  peptide (1)..(263): Ceres Seq. ID no. 13494589
  misc_feature (1)..(249): NCBI GI NO: 22773231 NR Description: Putative RNA-binding protein
  misc_feature (1)..(248): NCBI GI NO: 18087662 NR Description: putative RNA-binding protein [Oryza sativa]
  misc_feature (1)..(242): NCBI GI NO: 30682679 NR Description: expressed protein [Arabidopsis thaliana]
  misc_feature (1)..(242): NCBI GI NO: 25084169 NR Description: Unknown protein [Arabidopsis thaliana]
  misc_feature (1)..(242): NCBI GI NO: 30682683 NR Description: expressed protein [Arabidopsis thaliana]
  misc_feature (1)..(244): NCBI GI NO: 18405397 NR Description: expressed protein [Arabidopsis thaliana]
  misc_feature (1)..(112): NCBI GI NO: 25372787 NR Description: Rubisco subunit binding-protein beta subunit
  misc_feature (1)..(151): NCBI GI NO: 34395023 NR Description: high-glucose-regulated protein 8-like
  misc_feature (1)..(99): NCBI GI NO: 30682433 NR Description: expressed protein [Arabidopsis thaliana]
  misc_feature (1)..(99): NCBI GI NO: 30682438 NR Description: expressed protein [Arabidopsis thaliana]

SEQ ID NO: 41357 - protein, 244 aa, Zea mays subsp. mays; identical to SEQ ID NO: 35449
  peptide (1)..(244): Ceres Seq. ID no. 13494590
  misc_feature (1)..(230): NCBI GI NO: 22773231 NR Description: Putative RNA-binding protein
  misc_feature (1)..(229): NCBI GI NO: 18087662 NR Description: putative RNA-binding protein [Oryza sativa]
  misc_feature (1)..(223): NCBI GI NO: 30682679 NR Description: expressed protein [Arabidopsis thaliana]
  misc_feature (1)..(223): NCBI GI NO: 25084169 NR Description: Unknown protein [Arabidopsis thaliana]
  misc_feature (1)..(223): NCBI GI NO: 30682683 NR Description: expressed protein [Arabidopsis thaliana]
  misc_feature (1)..(225): NCBI GI NO: 18405397 NR Description: expressed protein [Arabidopsis thaliana]
  misc_feature (1)..(93): NCBI GI NO: 25372787 NR Description: Rubisco subunit binding-protein beta subunit
  misc_feature (1)..(132): NCBI GI NO: 34395023 NR Description: high-glucose-regulated protein 8-like
  misc_feature (1)..(80): NCBI GI NO: 30682433 NR Description: expressed protein [Arabidopsis thaliana]
  misc_feature (1)..(80): NCBI GI NO: 30682438 NR Description: expressed protein [Arabidopsis thaliana]

SEQ ID NO: 41358 - DNA, 1101 bp, Zea mays subsp. mays
  misc_feature (1)..(1101): Ceres Seq. ID no. 13586344
caacctttcaaattgaattgggctaccagtggggctggtgagaaacgtggagacgatggttcagattatactatatttgttggggacttggcctcggatgttacagatttcattctacaagatacgttcaagagtcgttatccatcagttaagggtgcaaaagttgtctttgacagaactactggccgttcgaaaggctatggttttgtaaagtttgcagattcggatgaacagacacgggcaatgactgaaatgaatggacaatactgttctagcagggccatgcgccttggaccagcatccaacaagaagaatactggtggaccacaaccatcgagtgctatttaccagaacacccaaggaactgattctgatagcgatccgaacaatactactgtatttgttggtggccttgacccgagtgtgactgatgagcttctgaagcaaaccttcagtccatatggagagcttctctatgtcaaaatacctgtaggaaagcgctgcgggtttgtccaatattctaacagggcatcagctgaggaggccataagggtgctaaatggaagccagctgggaggtcagagcataaggctctcatggggccgtagccctgcaaacaagcagcctcagcaagagcagagccaatggagtggtggcggctattatgggtatccccaaggatacgatccatatggctatgctcggccccctcaagatcctgccatgtacgcctacgcagcatatccagggtatggaaattaccagcaacagccaccacagcagcccccgccacaacagtaatgatgtcccgagagtgatcatttgcaagctggtcgcaaagtagctgggggttggggcgcagcaactttggtgcgttggcatgagaaattttgcggcggttgcttgtgttgtgttgtattgttccgacgcccttgtacacgtagcctgtgttgtaactgaatttttgccgaggccttatgagtgactagtgtttcaactgtaactggattgcacatttttgtctcaaggaatgtactattattgtgtggctcgtgccgctttgaacgctgagtccaggtattaatttttcttcatgctctt

SEQ ID NO: 41359 - protein, 266 aa, Zea mays subsp. mays
  peptide (1)..(266): Ceres Seq. ID no. 13586345
  misc_feature (25)..(97): Pfam Name: a.k.a. RRM, RBD, or RNP domain Pfam Description: RNA recognition motif.
  misc_feature (1)..(265): NCBI GI NO: 34896988 NR Description: putative RNA binding protein [Oryza sativa]
  misc_feature (1)..(266): NCBI GI NO: 30524689 NR Description: salt tolerance protein 6 [Beta vulgaris]
  misc_feature (1)..(266): NCBI GI NO: 34395214 NR Description: putative RNA Binding Protein
  misc_feature (1)..(266): NCBI GI NO: 34901884 NR Description: putative RNA Binding Protein 45
  misc_feature (1)..(261): NCBI GI NO: 9663767 NR Description: RNA Binding Protein 45 [Nicotiana plumbaginifolia]
  misc_feature (1)..(266): NCBI GI NO: 40253807 NR Description: putative RNA Binding Protein 45
  misc_feature (1)..(265): NCBI GI NO: 7485342 NR Description: hypothetical protein F10M23
  misc_feature (1)..(265): NCBI GI NO: 18416906 NR Description: RNA binding protein 45 (RBP45), putative
  misc_feature (1)..(257): NCBI GI NO: 9758270 NR Description: contains similarity to polyadenylate-bindingprotein 5~gene_id:MBG8
  misc_feature (1)..(257): NCBI GI NO: 18423684 NR Description: RNA binding protein 45 (RBP45), putative
QPFKLNWATSGAGEKRGDDGSDYTIFVGDLASDVTDFILQDTFKSRYPSVKGAKVVFDRTTGRSKGYGFVKFADSDEQTRAMTEMNGQYCSSRAMRLGPASNKKNTGGPQPSSAIYQNTQGTDSDSDPNNTTVFVGGLDPSVTDELLKQTFSPYGELLYVKIPVGKRCGFVQYSNRASAEEAIRVLNGSQLGGQSIRLSWGRSPANKQPQQEQSQWSGGGYYGYPQGYDPYGYARPPQDPAMYAYAAYPGYGNYQQQPPQQPPPQQ

SEQ ID NO: 41360 - protein, 185 aa, Zea mays subsp. mays
  peptide (1)..(185): Ceres Seq. ID no. 13586346
  misc_feature (1)..(184): NCBI GI NO: 34896988 NR Description: putative RNA binding protein [Oryza sativa]
  misc_feature (1)..(185): NCBI GI NO: 30524689 NR Description: salt tolerance protein 6 [Beta vulgaris]
  misc_feature (1)..(185): NCBI GI NO: 34395214 NR Description: putative RNA Binding Protein
  misc_feature (1)..(185): NCBI GI NO: 34901884 NR Description: putative RNA Binding Protein 45
  misc_feature (1)..(180): NCBI GI NO: 9663767 NR Description: RNA Binding Protein 45 [Nicotiana plumbaginifolia]
  misc_feature (1)..(185): NCBI GI NO: 40253807 NR Description: putative RNA Binding Protein 45
  misc_feature (1)..(184): NCBI GI NO: 7485342 NR Description: hypothetical protein F10M23
  misc_feature (1)..(184): NCBI GI NO: 18416906 NR Description: RNA binding protein 45 (RBP45), putative
  misc_feature (1)..(176): NCBI GI NO: 9758270 NR Description: contains similarity to polyadenylate-bindingprotein 5~gene_id:MBG8
  misc_feature (1)..(176): NCBI GI NO: 18423684 NR Description: RNA binding protein 45 (RBP45), putative
MTEMNGQYCSSRAMRLGPASNKKNTGGPQPSSAIYQNTQGTDSDSDPNNTTVFVGGLDPSVTDELLKQTFSPYGELLYVKIPVGKRCGFVQYSNRASAEEAIRVLNGSQLGGQSIRLSWGRSPANKQPQQEQSQWSGGGYYGYPQGYDPYGYARPPQDPAMYAYAAYPGYGNYQQQPPQQPPPQQ

SEQ ID NO: 41361 - protein, 182 aa, Zea mays subsp. mays
  peptide (1)..(182): Ceres Seq. ID no. 13586347
  misc_feature (1)..(181): NCBI GI NO: 34896988 NR Description: putative RNA binding protein [Oryza sativa]
  misc_feature (1)..(182): NCBI GI NO: 30524689 NR Description: salt tolerance protein 6 [Beta vulgaris]
  misc_feature (1)..(182): NCBI GI NO: 34395214 NR Description: putative RNA Binding Protein
  misc_feature (1)..(182): NCBI GI NO: 34901884 NR Description: putative RNA Binding Protein 45
  misc_feature (1)..(177): NCBI GI NO: 9663767 NR Description: RNA Binding Protein 45 [Nicotiana plumbaginifolia]
  misc_feature (1)..(182): NCBI GI NO: 40253807 NR Description: putative RNA Binding Protein 45
  misc_feature (1)..(181): NCBI GI NO: 7485342 NR Description: hypothetical protein F10M23
  misc_feature (1)..(181): NCBI GI NO: 18416906 NR Description: RNA binding protein 45 (RBP45), putative
  misc_feature (1)..(173): NCBI GI NO: 9758270 NR Description: contains similarity to polyadenylate-bindingprotein 5~gene_id:MBG8
  misc_feature (1)..(173): NCBI GI NO: 18423684 NR Description: RNA binding protein 45 (RBP45), putative
MNGQYCSSRAMRLGPASNKKNTGGPQPSSAIYQNTQGTDSDSDPNNTTVFVGGLDPSVTDELLKQTFSPYGELLYVKIPVGKRCGFVQYSNRASAEEAIRVLNGSQLGGQSIRLSWGRSPANKQPQQEQSQWSGGGYYGYPQGYDPYGYARPPQDPAMYAYAAYPGYGNYQQQPPQQPPPQQ

SEQ ID NO: 41362 - DNA, 692 bp, Zea mays subsp. mays
  misc_feature (1)..(692): Ceres Seq. ID no. 12364056
gctaaagaaagaggtcctgtcacagatatcgatccgattgggaattctcctgtgatcattaagaagacaattcttgagaagattgcccccacatggatgaatgtgtcaattcaaatgaaagaggatgaagagacagataaagtttttggatgggtgttggaaatgtatgcatacgctgttgctagcgcattgcatggagttcatcatatccttcgtaaagatttcatgatccagccaccttttgatacaaagctccagaatacatttataatccacttcacttatggatgtgactactcactaaagggtgaactgacctatggtaaagttggtgaatggcgatttgacaaaagatcattcccagataggccaccaccaagaaatcttacattgccccctcctggagtaccagaaagtgtggttactctagtgaaaatggtcaatgaagctagtgcaaaccttcctcggtgggatgatggaatataaactttggatgatgtcaattatatcttaggttcctttgatctgcccttgtatatggggaatatcaaagtatcaggtgcagtcggttgtttggtttacatccaaaatagctgcttgcacttgcacaccatacctgatagaagaagatacataattttctcattgtactttttaggaaaagaaaagaaatgaaagtaaagttagcatcg

SEQ ID NO: 41363 - protein, 161 aa, Zea mays subsp. mays
  peptide (1)..(161): Ceres Seq. ID no. 12364057
  misc_feature (3)..(158): NCBI GI NO: 15240642 NR Description: putative protein; protein id: At5g13500
  misc_feature (4)..(157): NCBI GI NO: 22327055 NR Description: Expressed protein; protein id: At5g25265
  misc_feature (2)..(158): NCBI GI NO: 24413996 NR Description: hypothetical protein~similar to Arabidopsisthaliana chromosome 5
  misc_feature (2)..(158): NCBI GI NO: 30682704 NR Description: expressed protein [Arabidopsis thaliana]
  misc_feature (2)..(155): NCBI GI NO: 25371351 NR Description: hypothetical protein At2g25260
AKERGPVTDIDPIGNSPVIIKKTILEKIAPTWMNVSIQMKEDEETDKVFGWVLEMYAYAVASALHGVHHILRKDFMIQPPFDTKLQNTFIIHFTYGCDYSLKGELTYGKVGEWRFDKRSFPDRPPPRNLTLPPPGVPESVVTLVKMVNEASANLPRWDDGI

SEQ ID NO: 41364 - protein, 129 aa, Zea mays subsp. mays
  peptide (1)..(129): Ceres Seq. ID no. 12364058
  misc_feature (1)..(126): NCBI GI NO: 15240642 NR Description: putative protein; protein id: At5g13500
  misc_feature (1)..(125): NCBI GI NO: 22327055 NR Description: Expressed protein; protein id: At5g25265
  misc_feature (1)..(126): NCBI GI NO: 24413996 NR Description: hypothetical protein~similar to Arabidopsisthaliana chromosome 5
  misc_feature (1)..(126): NCBI GI NO: 30682704 NR Description: expressed protein [Arabidopsis thaliana]
  misc_feature (1)..(123): NCBI GI NO: 25371351 NR Description: hypothetical protein At2g25260
MNVSIQMKEDEETDKVFGWVLEMYAYAVASALHGVHHILRKDFMIQPPFDTKLQNTFIIHFTYGCDYSLKGELTYGKVGEWRFDKRSFPDRPPPRNLTLPPPGVPESVVTLVKMVNEASANLPRWDDGI

SEQ ID NO: 41365 - protein, 123 aa, Zea mays subsp. mays
  peptide (1)..(123): Ceres Seq. ID no. 12364059
  misc_feature (1)..(120): NCBI GI NO: 15240642 NR Description: putative protein; protein id: At5g13500
  misc_feature (1)..(119): NCBI GI NO: 22327055 NR Description: Expressed protein; protein id: At5g25265
  misc_feature (1)..(120): NCBI GI NO: 24413996 NR Description: hypothetical protein~similar to Arabidopsisthaliana chromosome 5
  misc_feature (1)..(120): NCBI GI NO: 30682704 NR Description: expressed protein [Arabidopsis thaliana]
  misc_feature (1)..(117): NCBI GI NO: 25371351 NR Description: hypothetical protein At2g25260
MKEDEETDKVFGWVLEMYAYAVASALHGVHHILRKDFMIQPPFDTKLQNTFIIHFTYGCDYSLKGELTYGKVGEWRFDKRSFPDRPPPRNLTLPPPGVPESVVTLVKMVNEASANLPRWDDGI

SEQ ID NO: 41366 - DNA, 1458 bp, Zea mays subsp. mays; identical to SEQ ID NO: 36074
  misc_feature (1)..(1458): Ceres Seq. ID no. 13586374

SEQ ID NO: 41367 - protein, 371 aa, Zea mays subsp. mays; identical to SEQ ID NO: 36075
  peptide (1)..(371): Ceres Seq. ID no. 13586375
  misc_feature (137)..(364): Pfam Name: Pfam Description:  Papain family cysteine protease
  misc_feature (1)..(371): NCBI GI NO: 1706260 NR Description: Cysteine proteinase 1 precursor
  misc_feature (6)..(369): NCBI GI NO: 15705865 NR Description: cysteine proteinase precursor
  misc_feature (6)..(369): NCBI GI NO: 5051468 NR Description: putative preprocysteine proteinase
  misc_feature (6)..(369): NCBI GI NO: 4757570 NR Description: cysteine proteinase precursor [Solanum melongena]
  misc_feature (6)..(369): NCBI GI NO: 28192375 NR Description: CPR2-like cysteine proteinase [Nicotiana tabacum]
  misc_feature (6)..(371): NCBI GI NO: 7435795 NR Description: cysteine proteinase (EC 3
  misc_feature (6)..(369): NCBI GI NO: 419782 NR Description: cysteine proteinase (EC 3
  misc_feature (4)..(369): NCBI GI NO: 100203 NR Description: cysteine proteinase (EC 3
  misc_feature (6)..(369): NCBI GI NO: 419781 NR Description: cysteine proteinase (EC 3
  misc_feature (1)..(366): NCBI GI NO: 7381219 NR Description: papain-like cysteine proteinase isoform I

SEQ ID NO: 41368 - DNA, 392 bp, Zea mays subsp. mays
  misc_feature (1)..(392): Ceres Seq. ID no. 12595039
aattgtggctcctcacttctgcgccgccacccactacaggaagaggaggagggcaggatgtcgcaccgtaagttcgagcacccgaggcacggctccctcggcttccttcccaggaagcgctcctcccgccaccgcgcaaggtgaagtcatttcccagggatgaccccaagaagccttgccatctcactgccttccttggctacaagctggcatgactcacattgtccgtgaggttgagaagccaggatccaaactccataagaaggaaacttgtgaggctgttaccatcattgaaacccctcctcttgtcattgttgggctcgtggcatatgtgaagactcctcgtggcctccgcacactcaactctgtttgggcccaacatcttagcgaag

SEQ ID NO: 41369 - protein, 60 aa, Zea mays subsp. mays
  peptide (1)..(60): Ceres Seq. ID no. 12595040
  misc_feature (1)..(59): Pfam Name: Pfam Description:  Ribosomal protein L3
  misc_feature (1)..(59): NCBI GI NO: 33526877 NR Description: ribosomal protein L3 [Triticum aestivum]
  misc_feature (1)..(59): NCBI GI NO: 33526886 NR Description: ribosomal protein L3 [Triticum aestivum]
  misc_feature (1)..(59): NCBI GI NO: 548770 NR Description: 60S RIBOSOMAL PROTEIN L3
  misc_feature (1)..(59): NCBI GI NO: 34105768 NR Description: ribosomal protein L3 [Triticum aestivum]
  misc_feature (1)..(59): NCBI GI NO: 38327504 NR Description: ribosomal protein L3 [Lycopersicon esculentum]
  misc_feature (1)..(59): NCBI GI NO: 81657 NR Description: ribosomal protein L3
  misc_feature (1)..(59): NCBI GI NO: 6688812 NR Description: L3 Ribosomal protein
  misc_feature (1)..(59): NCBI GI NO: 15218306 NR Description: ribosomal protein; protein id: At1g43170
  misc_feature (1)..(59): NCBI GI NO: 81658 NR Description: ribosomal protein L3
  misc_feature (1)..(59): NCBI GI NO: 15220533 NR Description: ribosomal protein; protein id: At1g61580.1
MTHIVREVEKPGSKLHKKETCEAVTIIETPPLVIVGLVAYVKTPRGLRTLNSVWAQHLSE

SEQ ID NO: 41370 - protein, 53 aa, Zea mays subsp. mays
  peptide (1)..(53): Ceres Seq. ID no. 12595041
  misc_feature (25)..(53): NCBI GI NO: 15293867 NR Description: ribosomal protein L3 [Ictalurus punctatus]
  misc_feature (25)..(53): NCBI GI NO: 17553058 NR Description: 60S Ribosomal Protein, Large subunit 3, RPL-3 (45
IVAPHFCAATHYRKRRRAGCRTVSSSTRGTAPSASFPGSAPPATAQGEVISQG

SEQ ID NO: 41371 - protein, 47 aa, Zea mays subsp. mays
  peptide (1)..(47): Ceres Seq. ID no. 12595042
  misc_feature (20)..(47): NCBI GI NO: 33526877 NR Description: ribosomal protein L3 [Triticum aestivum]
  misc_feature (20)..(47): NCBI GI NO: 33526886 NR Description: ribosomal protein L3 [Triticum aestivum]
  misc_feature (20)..(47): NCBI GI NO: 548770 NR Description: 60S RIBOSOMAL PROTEIN L3
  misc_feature (20)..(47): NCBI GI NO: 34105768 NR Description: ribosomal protein L3 [Triticum aestivum]
  misc_feature (20)..(47): NCBI GI NO: 38327504 NR Description: ribosomal protein L3 [Lycopersicon esculentum]
  misc_feature (20)..(47): NCBI GI NO: 6688812 NR Description: L3 Ribosomal protein
  misc_feature (20)..(47): NCBI GI NO: 81657 NR Description: ribosomal protein L3
  misc_feature (20)..(47): NCBI GI NO: 15218306 NR Description: ribosomal protein; protein id: At1g43170
  misc_feature (20)..(47): NCBI GI NO: 81658 NR Description: ribosomal protein L3
  misc_feature (20)..(47): NCBI GI NO: 15220533 NR Description: ribosomal protein; protein id: At1g61580.1
NCGSSLLRRHPLQEEEEGRMSHRKFEHPRHGSLGFLPRKRSSRHRAR

SEQ ID NO: 41372 - DNA, 818 bp, Zea mays subsp. mays
  misc_feature (1)..(818): Ceres Seq. ID no. 12347624
  misc_feature (99)..(99): n is a, c, t, g, unknown, or other
taagcgacatcacaggggagacaagaggtggttcagggattgcctttggaagtgagatgtcaggtggcatatcggaagtacgggctgtgggcctccgcnttgtcaactcccttcacgggatcagaatcaagacggccccggggcgcggagggtacgtggagaatgtgtacatagcagatgtgagcatggacaatgtttcgatggccatcaggatcactggaaactacggtgaacatcctgatgacaaatatgacagcactgctctccctgtgataagcaatattacaatcaaggatgttgttggcgttaacattggggttgctggtatattggaaggcattcagggggacaatttcagcaacatttgtctgtccaatgtttccctcagtgtgcaatctgcacatccatggaattgttcacttattgaagggtattcgaactcggtgatcccagaatcatgcgaacagctcagaagcaattgtagacagacatccatttgctacgatggaagcagttcttcagtaatgcgtgtgcagcaaccaagacatacatcgcccaccagccggttgctagatcttttttctggagttggcttcattttagtgtaggtagagctgtgcttgttcttgctgcaaagggggcttgcttcatgtagtgagagccctattagtcatgtatatctgattcttgcaattatttgtgattagagtgccacttgcttcatgtatatagctgttgagatgactgtcggtgtatctttgcctgttttgttccaatttttggtatgtgaatgcaatctgcataactttatggttttg

SEQ ID NO: 41373 - protein, 201 aa, Zea mays subsp. mays
  peptide (1)..(201): Ceres Seq. ID no. 12347625
  misc_feature (10)..(153): Pfam Name: Pfam Description:  Glycosyl hydrolases family 28
  misc_feature (1)..(191): NCBI GI NO: 40714685 NR Description: putative polygalacturonase
  misc_feature (2)..(193): NCBI GI NO: 34393209 NR Description: putative polygalacturonase
  misc_feature (3)..(185): NCBI GI NO: 11263971 NR Description: hypothetical protein T17J13
  misc_feature (3)..(185): NCBI GI NO: 18412253 NR Description: polygalacturonase, putative; protein id:At3g62110
  misc_feature (10)..(171): NCBI GI NO: 7939578 NR Description: polygalacturonase-like protein
  misc_feature (10)..(171): NCBI GI NO: 15228881 NR Description: polygalacturonase, putative; protein id:At3g16850
  misc_feature (10)..(171): NCBI GI NO: 21553827 NR Description: polygalacturonase, putative [Arabidopsis thaliana]
  misc_feature (13)..(156): NCBI GI NO: 15236514 NR Description: polygalacturonase, putative; protein id:At4g23500
  misc_feature (10)..(157): NCBI GI NO: 18397713 NR Description: polygalacturonase, putative; protein id:At3g06770
  misc_feature (10)..(157): NCBI GI NO: 21593399 NR Description: polygalacturonase-like protein
  misc_feature (33)..(33): Xaa is any aa, unknown or other
SDITGETRGGSGIAFGSEMSGGISEVRAVGLRXVNSLHGIRIKTAPGRGGYVENVYIADVSMDNVSMAIRITGNYGEHPDDKYDSTALPVISNITIKDVVGVNIGVAGILEGIQGDNFSNICLSNVSLSVQSAHPWNCSLIEGYSNSVIPESCEQLRSNCRQTSICYDGSSSSVMRVQQPRHTSPTSRLLDLFSGVGFILV

SEQ ID NO: 41374 - protein, 183 aa, Zea mays subsp. mays
  peptide (1)..(183): Ceres Seq. ID no. 12347626
  misc_feature (1)..(135): Pfam Name: Pfam Description:  Glycosyl hydrolases family 28
  misc_feature (1)..(173): NCBI GI NO: 40714685 NR Description: putative polygalacturonase
  misc_feature (1)..(175): NCBI GI NO: 34393209 NR Description: putative polygalacturonase
  misc_feature (1)..(167): NCBI GI NO: 11263971 NR Description: hypothetical protein T17J13
  misc_feature (1)..(167): NCBI GI NO: 18412253 NR Description: polygalacturonase, putative; protein id:At3g62110
  misc_feature (1)..(153): NCBI GI NO: 7939578 NR Description: polygalacturonase-like protein
  misc_feature (1)..(153): NCBI GI NO: 21553827 NR Description: polygalacturonase, putative [Arabidopsis thaliana]
  misc_feature (1)..(153): NCBI GI NO: 15228881 NR Description: polygalacturonase, putative; protein id:At3g16850
  misc_feature (1)..(138): NCBI GI NO: 15236514 NR Description: polygalacturonase, putative; protein id:At4g23500
  misc_feature (1)..(139): NCBI GI NO: 18397713 NR Description: polygalacturonase, putative; protein id:At3g06770
  misc_feature (1)..(139): NCBI GI NO: 30679999 NR Description: polygalacturonase, putative [Arabidopsis thaliana]
  misc_feature (15)..(15): Xaa is any aa, unknown or other
MSGGISEVRAVGLRXVNSLHGIRIKTAPGRGGYVENVYIADVSMDNVSMAIRITGNYGEHPDDKYDSTALPVISNITIKDVVGVNIGVAGILEGIQGDNFSNICLSNVSLSVQSAHPWNCSLIEGYSNSVIPESCEQLRSNCRQTSICYDGSSSSVMRVQQPRHTSPTSRLLDLFSGVGFILV

SEQ ID NO: 41375 - protein, 140 aa, Zea mays subsp. mays
  peptide (1)..(140): Ceres Seq. ID no. 12347627
  misc_feature (1)..(92): Pfam Name: Pfam Description:  Glycosyl hydrolases family 28
  misc_feature (1)..(130): NCBI GI NO: 40714685 NR Description: putative polygalacturonase
  misc_feature (1)..(132): NCBI GI NO: 34393209 NR Description: putative polygalacturonase
  misc_feature (1)..(124): NCBI GI NO: 11263971 NR Description: hypothetical protein T17J13
  misc_feature (1)..(124): NCBI GI NO: 18412253 NR Description: polygalacturonase, putative; protein id:At3g62110
  misc_feature (1)..(110): NCBI GI NO: 7939578 NR Description: polygalacturonase-like protein
  misc_feature (1)..(110): NCBI GI NO: 21553827 NR Description: polygalacturonase, putative [Arabidopsis thaliana]
  misc_feature (1)..(110): NCBI GI NO: 15228881 NR Description: polygalacturonase, putative; protein id:At3g16850
  misc_feature (1)..(95): NCBI GI NO: 15236514 NR Description: polygalacturonase, putative; protein id:At4g23500
  misc_feature (1)..(96): NCBI GI NO: 18397713 NR Description: polygalacturonase, putative; protein id:At3g06770
  misc_feature (1)..(96): NCBI GI NO: 30679999 NR Description: polygalacturonase, putative [Arabidopsis thaliana]
MDNVSMAIRITGNYGEHPDDKYDSTALPVISNITIKDVVGVNIGVAGILEGIQGDNFSNICLSNVSLSVQSAHPWNCSLIEGYSNSVIPESCEQLRSNCRQTSICYDGSSSSVMRVQQPRHTSPTSRLLDLFSGVGFILV

SEQ ID NO: 41376 - DNA, 543 bp, Zea mays subsp. mays
  misc_feature (1)..(543): Ceres Seq. ID no. 13622597
aattcttccagctttttgttggaagatgtctacagaaacccaggcccgctccagtttgaaggaccaggtgccgattcaaagcctatttcattgtgcgttgaggatcaagactatatgggcagaataaaaaagttgcaggaatacttggagaaggtgaagaggattgtgaagcctgggtgctcgcaggatgttcttaaagcggcgctgagtgccatgtcttctgtgacggaaacactgaacatcatgacttcatcttctaccggccagactccactgagtcattaggtaccatttcatggtatggatcataatccccacttttttcagtggtggcgattaacgagtttaggaacagcaaccctggtatcatacgggttattcttttgtagccttttggagagttctatcggttttggattcggtagtttatgaaggcttgttgatgagtttgagctcgaatagcttttgaaacagccggatgatgccatctttaataaaccaaattctgtgactgcattcacatttctgtcagttacctgagtc

SEQ ID NO: 41377 - protein, 94 aa, Zea mays subsp. mays
  peptide (1)..(94): Ceres Seq. ID no. 13622598
  misc_feature (1)..(92): NCBI GI NO: 2499488 NR Description: Pyrophosphate --fructose 6-phosphate 1-phosphotransferase alpha subunit
  misc_feature (1)..(89): NCBI GI NO: 15223082 NR Description: pyrophosphate-dependent phosphofructokinase alpha subunit -related
  misc_feature (1)..(89): NCBI GI NO: 15218074 NR Description: pyrophosphate-dependent phosphofructokinase alpha subunit -related
  misc_feature (1)..(91): NCBI GI NO: 129881 NR Description: Pyrophosphate --fructose 6-phosphate 1-phosphotransferase alpha subunit
  misc_feature (1)..(92): NCBI GI NO: 3790102 NR Description: pyrophosphate-dependent phosphofructokinase alpha subunit
  misc_feature (2)..(94): NCBI GI NO: 29647436 NR Description: putative pyrophosphate--fructose 6-phosphate 1-phosphotransferase alpha subunit
  misc_feature (31)..(84): NCBI GI NO: 18539421 NR Description: putative phosphofructokinase [Pinus sylvestris]
NSSSFLLEDVYRNPGPLQFEGPGADSKPISLCVEDQDYMGRIKKLQEYLEKVKRIVKPGCSQDVLKAALSAMSSVTETLNIMTSSSTGQTPLSH

SEQ ID NO: 41378 - protein, 56 aa, Zea mays subsp. mays
  peptide (1)..(56): Ceres Seq. ID no. 13622599
  misc_feature (1)..(54): NCBI GI NO: 2499488 NR Description: Pyrophosphate --fructose 6-phosphate 1-phosphotransferase alpha subunit
  misc_feature (1)..(51): NCBI GI NO: 15223082 NR Description: pyrophosphate-dependent phosphofructokinase alpha subunit -related
  misc_feature (1)..(51): NCBI GI NO: 15218074 NR Description: pyrophosphate-dependent phosphofructokinase alpha subunit -related
  misc_feature (1)..(53): NCBI GI NO: 129881 NR Description: Pyrophosphate --fructose 6-phosphate 1-phosphotransferase alpha subunit
  misc_feature (1)..(54): NCBI GI NO: 3790102 NR Description: pyrophosphate-dependent phosphofructokinase alpha subunit
  misc_feature (1)..(56): NCBI GI NO: 29647436 NR Description: putative pyrophosphate--fructose 6-phosphate 1-phosphotransferase alpha subunit
  misc_feature (1)..(46): NCBI GI NO: 18539421 NR Description: putative phosphofructokinase [Pinus sylvestris]
MGRIKKLQEYLEKVKRIVKPGCSQDVLKAALSAMSSVTETLNIMTSSSTGQTPLSH

SEQ ID NO: 41379 - DNA, 1573 bp, Zea mays subsp. mays; identical to SEQ ID NO: 24117
  misc_feature (1)..(1573): Ceres Seq. ID no. 13493056

SEQ ID NO: 41380 - protein, 389 aa, Zea mays subsp. mays; identical to SEQ ID NO: 24118
  peptide (1)..(389): Ceres Seq. ID no. 13493057
  misc_feature (50)..(343): Pfam Name: Pfam Description:  Ribosomal protein L3
  misc_feature (1)..(389): NCBI GI NO: 548770 NR Description: 60S RIBOSOMAL PROTEIN L3
  misc_feature (1)..(381): NCBI GI NO: 6688812 NR Description: L3 Ribosomal protein
  misc_feature (1)..(389): NCBI GI NO: 15220533 NR Description: 60S ribosomal protein L3 (RPL3B)
  misc_feature (1)..(389): NCBI GI NO: 81658 NR Description: ribosomal protein L3
  misc_feature (1)..(387): NCBI GI NO: 15218306 NR Description: 60S ribosomal protein L3 (RPL3A)
  misc_feature (1)..(387): NCBI GI NO: 23397228 NR Description: putative ribosomal protein [Arabidopsis thaliana]
  misc_feature (1)..(387): NCBI GI NO: 81657 NR Description: ribosomal protein L3
  misc_feature (1)..(388): NCBI GI NO: 7305441 NR Description: ribosomal protein L3; ribosomal protein L3 homolog
  misc_feature (1)..(388): NCBI GI NO: 4506649 NR Description: ribosomal protein L3
  misc_feature (1)..(388): NCBI GI NO: 22203712 NR Description: ribosomal protein L3 [Chlamys farreri]

SEQ ID NO: 41381 - protein, 337 aa, Zea mays subsp. mays; identical to SEQ ID NO: 24119
  peptide (1)..(337): Ceres Seq. ID no. 13493058
  misc_feature (1)..(291): Pfam Name: Pfam Description:  Ribosomal protein L3
  misc_feature (1)..(337): NCBI GI NO: 548770 NR Description: 60S RIBOSOMAL PROTEIN L3
  misc_feature (1)..(329): NCBI GI NO: 6688812 NR Description: L3 Ribosomal protein
  misc_feature (1)..(337): NCBI GI NO: 15220533 NR Description: 60S ribosomal protein L3 (RPL3B)
  misc_feature (1)..(337): NCBI GI NO: 81658 NR Description: ribosomal protein L3
  misc_feature (1)..(335): NCBI GI NO: 15218306 NR Description: 60S ribosomal protein L3 (RPL3A)
  misc_feature (1)..(335): NCBI GI NO: 23397228 NR Description: putative ribosomal protein [Arabidopsis thaliana]
  misc_feature (1)..(335): NCBI GI NO: 81657 NR Description: ribosomal protein L3
  misc_feature (1)..(336): NCBI GI NO: 7305441 NR Description: ribosomal protein L3; ribosomal protein L3 homolog
  misc_feature (1)..(336): NCBI GI NO: 4506649 NR Description: ribosomal protein L3
  misc_feature (1)..(336): NCBI GI NO: 22203712 NR Description: ribosomal protein L3 [Chlamys farreri]

SEQ ID NO: 41382 - protein, 237 aa, Zea mays subsp. mays; identical to SEQ ID NO: 24120
  peptide (1)..(237): Ceres Seq. ID no. 13493059
  misc_feature (1)..(191): Pfam Name: Pfam Description:  Ribosomal protein L3
  misc_feature (1)..(237): NCBI GI NO: 548770 NR Description: 60S RIBOSOMAL PROTEIN L3
  misc_feature (1)..(229): NCBI GI NO: 6688812 NR Description: L3 Ribosomal protein
  misc_feature (1)..(237): NCBI GI NO: 15220533 NR Description: 60S ribosomal protein L3 (RPL3B)
  misc_feature (1)..(237): NCBI GI NO: 81658 NR Description: ribosomal protein L3
  misc_feature (1)..(235): NCBI GI NO: 15218306 NR Description: 60S ribosomal protein L3 (RPL3A)
  misc_feature (1)..(235): NCBI GI NO: 23397228 NR Description: putative ribosomal protein [Arabidopsis thaliana]
  misc_feature (1)..(235): NCBI GI NO: 81657 NR Description: ribosomal protein L3
  misc_feature (1)..(236): NCBI GI NO: 7305441 NR Description: ribosomal protein L3; ribosomal protein L3 homolog
  misc_feature (1)..(236): NCBI GI NO: 4506649 NR Description: ribosomal protein L3
  misc_feature (1)..(236): NCBI GI NO: 22203712 NR Description: ribosomal protein L3 [Chlamys farreri]

SEQ ID NO: 41383 - DNA, 1738 bp, Zea mays subsp. mays; identical to SEQ ID NO: 29499
  misc_feature (1)..(1738): Ceres Seq. ID no. 12413950

SEQ ID NO: 41384 - protein, 418 aa, Zea mays subsp. mays; identical to SEQ ID NO: 29500
  peptide (1)..(418): Ceres Seq. ID no. 12413951
  misc_feature (31)..(404): Pfam Name: Pfam Description:  Mpp10 protein
  misc_feature (31)..(404): NCBI GI NO: 18425086 NR Description: expressed protein; protein id: At5g66540
  misc_feature (38)..(415): NCBI GI NO: 29351667 NR Description: similar to U3 small nucleolar ribonucleoproteinprotein
  misc_feature (38)..(415): NCBI GI NO: 34856326 NR Description: similar to U3 small nucleolar ribonucleoproteinprotein MPP10
  misc_feature (41)..(415): NCBI GI NO: 2230873 NR Description: M phase phosphoprotein 10 [Homo sapiens]
  misc_feature (26)..(418): NCBI GI NO: 28175284 NR Description: Unknown (protein for IMAGE:5543289)
  misc_feature (95)..(405): NCBI GI NO: 6322461 NR Description: part of small
  misc_feature (14)..(409): NCBI GI NO: 19920954 NR Description: CG13097-PA [Drosophila melanogaster]
  misc_feature (5)..(409): NCBI GI NO: 19114546 NR Description: putative component of the U3 small nucleolarribonucleoprotein
  misc_feature (193)..(415): NCBI GI NO: 21312690 NR Description: RIKEN cDNA 2810453H10 [Mus musculus]
  misc_feature (13)..(390): NCBI GI NO: 40740848 NR Description: hypothetical protein AN4298.2

SEQ ID NO: 41385 - protein, 380 aa, Zea mays subsp. mays; identical to SEQ ID NO: 29501
  peptide (1)..(380): Ceres Seq. ID no. 12413952
  misc_feature (1)..(366): Pfam Name: Pfam Description:  Mpp10 protein
  misc_feature (1)..(366): NCBI GI NO: 18425086 NR Description: expressed protein; protein id: At5g66540
  misc_feature (1)..(377): NCBI GI NO: 29351667 NR Description: similar to U3 small nucleolar ribonucleoproteinprotein
  misc_feature (1)..(377): NCBI GI NO: 34856326 NR Description: similar to U3 small nucleolar ribonucleoproteinprotein MPP10
  misc_feature (3)..(377): NCBI GI NO: 2230873 NR Description: M phase phosphoprotein 10 [Homo sapiens]
  misc_feature (1)..(380): NCBI GI NO: 28175284 NR Description: Unknown (protein for IMAGE:5543289)
  misc_feature (57)..(367): NCBI GI NO: 6322461 NR Description: part of small
  misc_feature (1)..(371): NCBI GI NO: 19920954 NR Description: CG13097-PA [Drosophila melanogaster]
  misc_feature (1)..(371): NCBI GI NO: 19114546 NR Description: putative component of the U3 small nucleolarribonucleoprotein
  misc_feature (155)..(377): NCBI GI NO: 21312690 NR Description: RIKEN cDNA 2810453H10 [Mus musculus]
  misc_feature (1)..(352): NCBI GI NO: 40740848 NR Description: hypothetical protein AN4298.2

SEQ ID NO: 41386 - protein, 326 aa, Zea mays subsp. mays; identical to SEQ ID NO: 29502
  peptide (1)..(326): Ceres Seq. ID no. 12413953
  misc_feature (1)..(312): Pfam Name: Pfam Description:  Mpp10 protein
  misc_feature (1)..(312): NCBI GI NO: 18425086 NR Description: expressed protein; protein id: At5g66540
  misc_feature (1)..(323): NCBI GI NO: 29351667 NR Description: similar to U3 small nucleolar ribonucleoproteinprotein
  misc_feature (1)..(323): NCBI GI NO: 34856326 NR Description: similar to U3 small nucleolar ribonucleoproteinprotein MPP10
  misc_feature (1)..(323): NCBI GI NO: 2230873 NR Description: M phase phosphoprotein 10 [Homo sapiens]
  misc_feature (1)..(326): NCBI GI NO: 28175284 NR Description: Unknown (protein for IMAGE:5543289)
  misc_feature (3)..(313): NCBI GI NO: 6322461 NR Description: part of small
  misc_feature (1)..(317): NCBI GI NO: 19920954 NR Description: CG13097-PA [Drosophila melanogaster]
  misc_feature (1)..(317): NCBI GI NO: 19114546 NR Description: putative component of the U3 small nucleolarribonucleoprotein
  misc_feature (101)..(323): NCBI GI NO: 21312690 NR Description: RIKEN cDNA 2810453H10 [Mus musculus]
  misc_feature (1)..(298): NCBI GI NO: 40740848 NR Description: hypothetical protein AN4298.2

SEQ ID NO: 41387 - DNA, 958 bp, Zea mays subsp. mays; identical to SEQ ID NO: 25880
  misc_feature (1)..(958): Ceres Seq. ID no. 13571162

SEQ ID NO: 41388 - protein, 231 aa, Zea mays subsp. mays; identical to SEQ ID NO: 25881
  peptide (1)..(231): Ceres Seq. ID no. 13571163
  misc_feature (45)..(211): Pfam Name: Pfam Description:  Chromadorea ALT protein
  misc_feature (21)..(224): NCBI GI NO: 34894890 NR Description: B1140D12.10
  misc_feature (25)..(230): NCBI GI NO: 18401985 NR Description: expressed protein [Arabidopsis thaliana]
  misc_feature (59)..(224): NCBI GI NO: 35210494 NR Description: aspartic acid-rich protein aspolin2
  misc_feature (59)..(224): NCBI GI NO: 35210492 NR Description: aspartic acid-rich protein aspolin1
  misc_feature (59)..(224): NCBI GI NO: 35210494 NR Description: aspartic acid-rich protein aspolin2
  misc_feature (50)..(224): NCBI GI NO: 33284873 NR Description: SI:bZ1G18
  misc_feature (52)..(224): NCBI GI NO: 35210492 NR Description: aspartic acid-rich protein aspolin1
  misc_feature (52)..(224): NCBI GI NO: 35210494 NR Description: aspartic acid-rich protein aspolin2
  misc_feature (59)..(224): NCBI GI NO: 35210494 NR Description: aspartic acid-rich protein aspolin2
  misc_feature (59)..(224): NCBI GI NO: 35210492 NR Description: aspartic acid-rich protein aspolin1

SEQ ID NO: 41389 - protein, 211 aa, Zea mays subsp. mays; identical to SEQ ID NO: 25882
  peptide (1)..(211): Ceres Seq. ID no. 13571164
  misc_feature (25)..(191): Pfam Name: Pfam Description:  Chromadorea ALT protein
  misc_feature (1)..(204): NCBI GI NO: 34894890 NR Description: B1140D12.10
  misc_feature (5)..(210): NCBI GI NO: 18401985 NR Description: expressed protein [Arabidopsis thaliana]
  misc_feature (39)..(204): NCBI GI NO: 35210494 NR Description: aspartic acid-rich protein aspolin2
  misc_feature (39)..(204): NCBI GI NO: 35210492 NR Description: aspartic acid-rich protein aspolin1
  misc_feature (39)..(204): NCBI GI NO: 35210494 NR Description: aspartic acid-rich protein aspolin2
  misc_feature (30)..(204): NCBI GI NO: 33284873 NR Description: SI:bZ1G18
  misc_feature (32)..(204): NCBI GI NO: 35210492 NR Description: aspartic acid-rich protein aspolin1
  misc_feature (32)..(204): NCBI GI NO: 35210494 NR Description: aspartic acid-rich protein aspolin2
  misc_feature (39)..(204): NCBI GI NO: 35210494 NR Description: aspartic acid-rich protein aspolin2
  misc_feature (39)..(204): NCBI GI NO: 35210492 NR Description: aspartic acid-rich protein aspolin1

SEQ ID NO: 41390 - protein, 195 aa, Zea mays subsp. mays; identical to SEQ ID NO: 25883
  peptide (1)..(195): Ceres Seq. ID no. 13571165
  misc_feature (9)..(175): Pfam Name: Pfam Description:  Chromadorea ALT protein
  misc_feature (1)..(188): NCBI GI NO: 34894890 NR Description: B1140D12.10
  misc_feature (1)..(194): NCBI GI NO: 18401985 NR Description: expressed protein [Arabidopsis thaliana]
  misc_feature (23)..(188): NCBI GI NO: 35210494 NR Description: aspartic acid-rich protein aspolin2
  misc_feature (23)..(188): NCBI GI NO: 35210492 NR Description: aspartic acid-rich protein aspolin1
  misc_feature (23)..(188): NCBI GI NO: 35210494 NR Description: aspartic acid-rich protein aspolin2
  misc_feature (14)..(188): NCBI GI NO: 33284873 NR Description: SI:bZ1G18
  misc_feature (16)..(188): NCBI GI NO: 35210492 NR Description: aspartic acid-rich protein aspolin1
  misc_feature (16)..(188): NCBI GI NO: 35210494 NR Description: aspartic acid-rich protein aspolin2
  misc_feature (23)..(188): NCBI GI NO: 35210494 NR Description: aspartic acid-rich protein aspolin2
  misc_feature (23)..(188): NCBI GI NO: 35210492 NR Description: aspartic acid-rich protein aspolin1

SEQ ID NO: 41391 - DNA, 1088 bp, Zea mays subsp. mays
  misc_feature (1)..(1088): Ceres Seq. ID no. 12377821
tacgccaagcccgcaattaaccctcactaaagggaacaaaagctggagctccaccgcggtggcggccgctctagaactagtggatcccccgggctgcaggaattcgcacgagaccattacctagaacatcctaatcgaaaattatccgaggttccgtgcagcagtggaaaagagcagattttagcagagcagcgagggtcggagaagcctccccaagcttcgaatcgctatgcagcccgtcaaggtgtacgccgaccggcggtcgcaaccctcccgagctgtcatcatcttctgcagggtgaaccagatcgatttcgaggaggtcacggtggatctgttcaagtctcagcacctcacacccgaattcaaaaaaataaacccaatgggacaggtacctgcaattgttgatggaagattcaaactatttgaaagtcatgcgattttgaggtatcttgcatcggttttccctggagtagctgaccactggtatccttctgacttgttcaccagagccaaaattgagtcaatcttggattggcatcactcaaatttgcggcgtggtgcagcaacccttgtaatgcacactgcattggctcccttccttggtcttacgacaagtcatgaggctgtgaaacaagcagagaagcttgtgatgcagtcactgggggtgatcgaatccgtatggctgaaaggcgatgccaagttcttgctaggtatcccccagccatcgattgcagatctgagccttgtctgtgagataatgcagttggagatccttggcgatgaggtccgtgaccgattcctgggagctcatgagaggatccttgtctggatggacaaggtgaagaaagccacgagccctcattttgaggaagcccacgagctccttttccaagtgaagaaggcacgcatggtgcaaggcagcagcagcaaggcttttgagtcgagcacaaagctcaaaacagcatcaaagctctgacgaccaaaggcagaataagcgacagacagatccatcttgtgatataatataataaacgggaactattattaattactgttggtattaattacacttattccagaaggcc

SEQ ID NO: 41392 - protein, 249 aa, Zea mays subsp. mays
  peptide (1)..(249): Ceres Seq. ID no. 12377822
  misc_feature (95)..(209): Pfam Name: Pfam Description:  Glutathione S-transferase, C-terminal domain
  misc_feature (1)..(249): NCBI GI NO: 15430709 NR Description: putative glutathione S-transferase OsGSTT1
  misc_feature (4)..(236): NCBI GI NO: 11385461 NR Description: glutathione S-transferase GST 23 [Glycine max]
  misc_feature (1)..(235): NCBI GI NO: 15237583 NR Description: glutathione transferase, putative
  misc_feature (4)..(224): NCBI GI NO: 30693769 NR Description: glutathione transferase, putative
  misc_feature (1)..(224): NCBI GI NO: 25453559 NR Description: glutathione transferase (EC 2.5.1.18) GST 10b
  misc_feature (4)..(224): NCBI GI NO: 10177768 NR Description: glutathione transferase [Arabidopsis thaliana]
  misc_feature (4)..(224): NCBI GI NO: 15237595 NR Description: glutathione transferase, putative
  misc_feature (4)..(236): NCBI GI NO: 7595788 NR Description: glutathione S-transferase [Euphorbia esula]
  misc_feature (2)..(238): NCBI GI NO: 33416577 NR Description: Unknown (protein for MGC:66350) [Danio rerio]
  misc_feature (4)..(223): NCBI GI NO: 7434050 NR Description: glutathione transferase (EC 2
MQPVKVYADRRSQPSRAVIIFCRVNQIDFEEVTVDLFKSQHLTPEFKKINPMGQVPAIVDGRFKLFESHAILRYLASVFPGVADHWYPSDLFTRAKIESILDWHHSNLRRGAATLVMHTALAPFLGLTTSHEAVKQAEKLVMQSLGVIESVWLKGDAKFLLGIPQPSIADLSLVCEIMQLEILGDEVRDRFLGAHERILVWMDKVKKATSPHFEEAHELLFQVKKARMVQGSSSKAFESSTKLKTASKL

SEQ ID NO: 41393 - protein, 198 aa, Zea mays subsp. mays
  peptide (1)..(198): Ceres Seq. ID no. 12377823
  misc_feature (44)..(158): Pfam Name: Pfam Description:  Glutathione S-transferase, C-terminal domain
  misc_feature (1)..(198): NCBI GI NO: 15430709 NR Description: putative glutathione S-transferase OsGSTT1
  misc_feature (1)..(185): NCBI GI NO: 11385461 NR Description: glutathione S-transferase GST 23 [Glycine max]
  misc_feature (1)..(184): NCBI GI NO: 15237583 NR Description: glutathione transferase, putative
  misc_feature (1)..(173): NCBI GI NO: 30693769 NR Description: glutathione transferase, putative
  misc_feature (1)..(173): NCBI GI NO: 25453559 NR Description: glutathione transferase (EC 2.5.1.18) GST 10b
  misc_feature (1)..(173): NCBI GI NO: 10177768 NR Description: glutathione transferase [Arabidopsis thaliana]
  misc_feature (1)..(173): NCBI GI NO: 15237595 NR Description: glutathione transferase, putative
  misc_feature (1)..(185): NCBI GI NO: 7595788 NR Description: glutathione S-transferase [Euphorbia esula]
  misc_feature (1)..(187): NCBI GI NO: 33416577 NR Description: Unknown (protein for MGC:66350) [Danio rerio]
  misc_feature (1)..(172): NCBI GI NO: 7434050 NR Description: glutathione transferase (EC 2
MGQVPAIVDGRFKLFESHAILRYLASVFPGVADHWYPSDLFTRAKIESILDWHHSNLRRGAATLVMHTALAPFLGLTTSHEAVKQAEKLVMQSLGVIESVWLKGDAKFLLGIPQPSIADLSLVCEIMQLEILGDEVRDRFLGAHERILVWMDKVKKATSPHFEEAHELLFQVKKARMVQGSSSKAFESSTKLKTASKL

SEQ ID NO: 41394 - protein, 133 aa, Zea mays subsp. mays
  peptide (1)..(133): Ceres Seq. ID no. 12377824
  misc_feature (1)..(93): Pfam Name: Pfam Description:  Glutathione S-transferase, C-terminal domain
  misc_feature (1)..(133): NCBI GI NO: 15430709 NR Description: putative glutathione S-transferase OsGSTT1
  misc_feature (1)..(120): NCBI GI NO: 11385461 NR Description: glutathione S-transferase GST 23 [Glycine max]
  misc_feature (1)..(119): NCBI GI NO: 15237583 NR Description: glutathione transferase, putative
  misc_feature (1)..(108): NCBI GI NO: 30693769 NR Description: glutathione transferase, putative
  misc_feature (1)..(108): NCBI GI NO: 25453559 NR Description: glutathione transferase (EC 2.5.1.18) GST 10b
  misc_feature (1)..(108): NCBI GI NO: 10177768 NR Description: glutathione transferase [Arabidopsis thaliana]
  misc_feature (1)..(108): NCBI GI NO: 15237595 NR Description: glutathione transferase, putative
  misc_feature (1)..(120): NCBI GI NO: 7595788 NR Description: glutathione S-transferase [Euphorbia esula]
  misc_feature (1)..(122): NCBI GI NO: 33416577 NR Description: Unknown (protein for MGC:66350) [Danio rerio]
  misc_feature (1)..(107): NCBI GI NO: 7434050 NR Description: glutathione transferase (EC 2
MHTALAPFLGLTTSHEAVKQAEKLVMQSLGVIESVWLKGDAKFLLGIPQPSIADLSLVCEIMQLEILGDEVRDRFLGAHERILVWMDKVKKATSPHFEEAHELLFQVKKARMVQGSSSKAFESSTKLKTASKL

SEQ ID NO: 41395 - DNA, 1968 bp, Zea mays subsp. mays; identical to SEQ ID NO: 27512
  misc_feature (1)..(1968): Ceres Seq. ID no. 12362596

SEQ ID NO: 41396 - protein, 488 aa, Zea mays subsp. mays; identical to SEQ ID NO: 27513
  peptide (1)..(488): Ceres Seq. ID no. 12362597
  misc_feature (1)..(359): NCBI GI NO: 18400970 NR Description: expressed protein; protein id: At3g15970
  misc_feature (1)..(359): NCBI GI NO: 21536684 NR Description: unknown [Arabidopsis thaliana]
  misc_feature (197)..(359): NCBI GI NO: 22655290 NR Description: unknown protein [Arabidopsis thaliana]
  misc_feature (1)..(310): NCBI GI NO: 18403992 NR Description: expressed protein; protein id: At1g52380
  misc_feature (117)..(359): NCBI GI NO: 18403992 NR Description: expressed protein; protein id: At1g52380
  misc_feature (1)..(360): NCBI GI NO: 40747404 NR Description: hypothetical protein AN0461.2

SEQ ID NO: 41397 - protein, 454 aa, Zea mays subsp. mays; identical to SEQ ID NO: 27514
  peptide (1)..(454): Ceres Seq. ID no. 12362598
  misc_feature (1)..(325): NCBI GI NO: 18400970 NR Description: expressed protein; protein id: At3g15970
  misc_feature (1)..(325): NCBI GI NO: 21536684 NR Description: unknown [Arabidopsis thaliana]
  misc_feature (163)..(325): NCBI GI NO: 22655290 NR Description: unknown protein [Arabidopsis thaliana]
  misc_feature (1)..(276): NCBI GI NO: 18403992 NR Description: expressed protein; protein id: At1g52380
  misc_feature (83)..(325): NCBI GI NO: 18403992 NR Description: expressed protein; protein id: At1g52380
  misc_feature (1)..(326): NCBI GI NO: 40747404 NR Description: hypothetical protein AN0461.2

SEQ ID NO: 41398 - protein, 443 aa, Zea mays subsp. mays; identical to SEQ ID NO: 27515
  peptide (1)..(443): Ceres Seq. ID no. 12362599
  misc_feature (1)..(314): NCBI GI NO: 18400970 NR Description: expressed protein; protein id: At3g15970
  misc_feature (1)..(314): NCBI GI NO: 21536684 NR Description: unknown [Arabidopsis thaliana]
  misc_feature (152)..(314): NCBI GI NO: 22655290 NR Description: unknown protein [Arabidopsis thaliana]
  misc_feature (1)..(265): NCBI GI NO: 18403992 NR Description: expressed protein; protein id: At1g52380
  misc_feature (72)..(314): NCBI GI NO: 18403992 NR Description: expressed protein; protein id: At1g52380
  misc_feature (1)..(315): NCBI GI NO: 40747404 NR Description: hypothetical protein AN0461.2

SEQ ID NO: 41399 - DNA, 468 bp, Zea mays subsp. mays
  misc_feature (1)..(468): Ceres Seq. ID no. 13622586
acctacagtcactcgaattctacttgcagtgcaaagaagccaatctcttccaacctgcttgcgagtttctccctatgattaatgaggtgtgttttatcttacagctactgcactaacaaactgcatttcttagtcgcagtacctcaacttgatatatctggaactctgttactgttcctagcgggtttccaagtgcctcgtggaggtcacgagttcaattgaaggtgcaagagttgagaacaacaagttctgtgtatctgtacattaccgcaacgtagcagagaaggactggaaagtggtcgcaggactcgtgaaacaagtcttggaggccttccctcgtctcaaagtaaccaacgggcgaatggttttagaggttcgcccggtgatcgactgggacaagggaaaggctgtcgagttcctgcttcggtcgctcggcctaagcgactccgaagawgtgggttcctatct

SEQ ID NO: 41400 - protein, 46 aa, Zea mays subsp. mays
  peptide (1)..(46): Ceres Seq. ID no. 13622587
MRCVLSYSYCTNKLHFLVAVPQLDISGTLLLFLAGFQVPRGGHEFN

SEQ ID NO: 41401 - protein, 37 aa, Zea mays subsp. mays
  peptide (1)..(37): Ceres Seq. ID no. 13622588
  misc_feature (2)..(34): NCBI GI NO: 30696054 NR Description: trehalose-6-phosphate phosphatase (TPPA)
  misc_feature (2)..(34): NCBI GI NO: 30696058 NR Description: trehalose-6-phosphate phosphatase (TPPA)
  misc_feature (9)..(29): NCBI GI NO: 15234552 NR Description: trehalose-6-phosphate phosphatase, putative
  misc_feature (11)..(29): NCBI GI NO: 37536726 NR Description: putative trehalose-6-phosphate phosphatase
LQSLEFYLQCKEANLFQPACEFLPMINEVCFILQLLH

SEQ ID NO: 41402 - protein, 35 aa, Zea mays subsp. mays
  peptide (1)..(35): Ceres Seq. ID no. 13622589
  misc_feature (1)..(32): NCBI GI NO: 30696054 NR Description: trehalose-6-phosphate phosphatase (TPPA)
  misc_feature (1)..(32): NCBI GI NO: 30696058 NR Description: trehalose-6-phosphate phosphatase (TPPA)
  misc_feature (1)..(30): NCBI GI NO: 15234552 NR Description: trehalose-6-phosphate phosphatase, putative
  misc_feature (1)..(32): NCBI GI NO: 38345480 NR Description: OSJNBa0010H02.18
  misc_feature (1)..(32): NCBI GI NO: 37536726 NR Description: putative trehalose-6-phosphate phosphatase
  misc_feature (1)..(32): NCBI GI NO: 18399940 NR Description: trehalose-6-phosphate phosphatase, putative
  misc_feature (1)..(32): NCBI GI NO: 25354597 NR Description: probable trehalose-phosphatase
  misc_feature (1)..(30): NCBI GI NO: 15235713 NR Description: trehalose-6-phosphate phosphatase, putative
  misc_feature (1)..(32): NCBI GI NO: 21554408 NR Description: trehalose-phosphatase, putative
  misc_feature (1)..(32): NCBI GI NO: 7487212 NR Description: hypothetical protein T19P19
  misc_feature (31)..(31): Xaa is any aa, unknown or other
MVLEVRPVIDWDKGKAVEFLLRSLGLSDSEXVGSY

SEQ ID NO: 41403 - DNA, 487 bp, Zea mays subsp. mays
  misc_feature (1)..(487): Ceres Seq. ID no. 4254698
tattcgcgaagacatcagcataaatcttggtcctctggaggagctatcgaacttgtacaaagctgatttgctactctgtgaatctggaggagataacttggcagctaacttcagcagagaattagcagactacataatctacattatcgatgtctctggtggggacaagataccaagaaaaggtggccctgggataacccaggccgatctgttggtaataaacaagacagacctagcacctgctgttggagctgatctgtctgtaatggagcgagacgcacttcgcatgcgcgaaggagggccctttgtgtttgcacaggtgaaacatggagtgggcgtggaggggatcgtgaaccatattctgcaggcgtgggagatcgcgactggtaataagcggcgataagatctcacgacttggggccatatgttggatgcagatttgattcagtcggcacttccacatgcatgtgtcatctgttcgtttctc

SEQ ID NO: 41404 - protein, 133 aa, Zea mays subsp. mays
  peptide (1)..(133): Ceres Seq. ID no. 4254699
  misc_feature (1)..(57): Pfam Name: Pfam Description:  HypB/UreG nucleotide-binding domain
  misc_feature (1)..(133): NCBI GI NO: 13161906 NR Description: urease accessory protein G [Solanum tuberosum]
  misc_feature (1)..(133): NCBI GI NO: 13161908 NR Description: urease accessory protein G [Solanum tuberosum]
  misc_feature (1)..(133): NCBI GI NO: 13161912 NR Description: urease accessory protein G [Solanum tuberosum]
  misc_feature (1)..(133): NCBI GI NO: 13161910 NR Description: urease accessory protein G [Solanum tuberosum]
  misc_feature (1)..(133): NCBI GI NO: 13161904 NR Description: urease accessory protein G [Solanum tuberosum]
  misc_feature (1)..(133): NCBI GI NO: 15226754 NR Description: putative urease accessory protein
  misc_feature (1)..(133): NCBI GI NO: 25313831 NR Description: urease accessory protein UREG
  misc_feature (1)..(121): NCBI GI NO: 5524682 NR Description: Ni-binding urease accessory protein UreG
  misc_feature (1)..(133): NCBI GI NO: 32414941 NR Description: probable Ni-binding urease accessory protein
  misc_feature (1)..(129): NCBI GI NO: 40746949 NR Description: hypothetical protein AN0232.2
IREDISINLGPLEELSNLYKADLLLCESGGDNLAANFSRELADYIIYIIDVSGGDKIPRKGGPGITQADLLVINKTDLAPAVGADLSVMERDALRMREGGPFVFAQVKHGVGVEGIVNHILQAWEIATGNKRR

SEQ ID NO: 41405 - protein, 45 aa, Zea mays subsp. mays; identical to SEQ ID NO: 30177
  peptide (1)..(45): Ceres Seq. ID no. 4254700
  misc_feature (1)..(45): NCBI GI NO: 13161906 NR Description: urease accessory protein G [Solanum tuberosum]
  misc_feature (1)..(45): NCBI GI NO: 13161908 NR Description: urease accessory protein G [Solanum tuberosum]
  misc_feature (1)..(45): NCBI GI NO: 13161912 NR Description: urease accessory protein G [Solanum tuberosum]
  misc_feature (1)..(45): NCBI GI NO: 13161910 NR Description: urease accessory protein G [Solanum tuberosum]
  misc_feature (1)..(45): NCBI GI NO: 13161904 NR Description: urease accessory protein G [Solanum tuberosum]
  misc_feature (1)..(45): NCBI GI NO: 15226754 NR Description: putative urease accessory protein
  misc_feature (1)..(45): NCBI GI NO: 25313831 NR Description: urease accessory protein UREG
  misc_feature (1)..(33): NCBI GI NO: 5524682 NR Description: Ni-binding urease accessory protein UreG
  misc_feature (1)..(45): NCBI GI NO: 32414941 NR Description: probable Ni-binding urease accessory protein
  misc_feature (1)..(41): NCBI GI NO: 40746949 NR Description: hypothetical protein AN0232.2

SEQ ID NO: 41406 - DNA, 431 bp, Zea mays subsp. mays
  misc_feature (1)..(431): Ceres Seq. ID no. 11403618
tgattacgagaaccgataaagtccgtgctcttcgtgaggctttctaccgccagaaccttccaaatgtgaccaatttgcttgccacagtcttggtcttcctcatagttatctatttccgaggcttccgtgttgtgcttccagtgagatcaaagtaatgctcgtggccagcaaggctcatatccaattaagctwattctacacttcaaacatgcccatcattctgcactctgcactgattaccaacctctatttcatatcccagcttctctacaggaagtacagtggaaacttccttgttaaccttcttgggatgtggaaggagtctgaatactctggccattcttcttcctgttggtggtcttgcttactatgtaactgccccatcaagtttggctgatgtccttgcaaatccattccatgcactgttttat

SEQ ID NO: 41407 - protein, 80 aa, Zea mays subsp. mays
  peptide (1)..(80): Ceres Seq. ID no. 11403619
  misc_feature (11)..(65): Pfam Name: Pfam Description:  eubacterial secY protein
  misc_feature (11)..(65): NCBI GI NO: 6581004 NR Description: putative integral membrane protein
  misc_feature (11)..(65): NCBI GI NO: 19335714 NR Description: probable transport protein Sec61 alpha subunit
  misc_feature (11)..(65): NCBI GI NO: 19920826 NR Description: CG9539-PA [Drosophila melanogaster]
  misc_feature (11)..(65): NCBI GI NO: 13173171 NR Description: putative transport protein Sec61 alpha subunit
  misc_feature (11)..(65): NCBI GI NO: 14861602 NR Description: probable transport protein Sec61 alpha subunit
  misc_feature (11)..(65): NCBI GI NO: 20071555 NR Description: Similar to Sec61 alpha form 2 [Homo sapiens]
  misc_feature (11)..(65): NCBI GI NO: 12230618 NR Description: Protein transport protein Sec61 alpha subunitisoform 2
  misc_feature (11)..(65): NCBI GI NO: 10434149 NR Description: unnamed protein product [Homo sapiens]
  misc_feature (11)..(65): NCBI GI NO: 19335712 NR Description: probable transport protein Sec61 alpha subunit
  misc_feature (11)..(65): NCBI GI NO: 10946604 NR Description: SEC61, alpha subunit 2 (S
  misc_feature (13)..(13): Xaa is any aa, unknown or other
MLVASKAHIQLSXFYTSNMPIILHSALITNLYFISQLLYRKYSGNFLVNLLGMWKESEYSGHSSSCWWSCLLCNCPIKFG

SEQ ID NO: 41408 - protein, 62 aa, Zea mays subsp. mays
  peptide (1)..(62): Ceres Seq. ID no. 11403620
  misc_feature (1)..(47): NCBI GI NO: 6581004 NR Description: putative integral membrane protein
  misc_feature (1)..(47): NCBI GI NO: 19335714 NR Description: probable transport protein Sec61 alpha subunit
  misc_feature (1)..(47): NCBI GI NO: 19920826 NR Description: CG9539-PA [Drosophila melanogaster]
  misc_feature (1)..(47): NCBI GI NO: 13173171 NR Description: putative transport protein Sec61 alpha subunit
  misc_feature (1)..(47): NCBI GI NO: 14861602 NR Description: probable transport protein Sec61 alpha subunit
  misc_feature (1)..(47): NCBI GI NO: 20071555 NR Description: Similar to Sec61 alpha form 2 [Homo sapiens]
  misc_feature (1)..(47): NCBI GI NO: 12230618 NR Description: Protein transport protein Sec61 alpha subunitisoform 2
  misc_feature (1)..(47): NCBI GI NO: 10434149 NR Description: unnamed protein product [Homo sapiens]
  misc_feature (1)..(47): NCBI GI NO: 19335712 NR Description: probable transport protein Sec61 alpha subunit
  misc_feature (1)..(47): NCBI GI NO: 10946604 NR Description: SEC61, alpha subunit 2 (S
MPIILHSALITNLYFISQLLYRKYSGNFLVNLLGMWKESEYSGHSSSCWWSCLLCNCPIKFG

SEQ ID NO: 41409 - protein, 50 aa, Zea mays subsp. mays
  peptide (1)..(50): Ceres Seq. ID no. 11403621
  misc_feature (1)..(50): NCBI GI NO: 6581004 NR Description: putative integral membrane protein
  misc_feature (2)..(49): NCBI GI NO: 19335714 NR Description: probable transport protein Sec61 alpha subunit
  misc_feature (2)..(49): NCBI GI NO: 19920826 NR Description: CG9539-PA [Drosophila melanogaster]
  misc_feature (2)..(49): NCBI GI NO: 13173171 NR Description: putative transport protein Sec61 alpha subunit
  misc_feature (2)..(49): NCBI GI NO: 14861602 NR Description: probable transport protein Sec61 alpha subunit
  misc_feature (2)..(49): NCBI GI NO: 20071555 NR Description: Similar to Sec61 alpha form 2 [Homo sapiens]
  misc_feature (2)..(49): NCBI GI NO: 12230618 NR Description: Protein transport protein Sec61 alpha subunitisoform 2
  misc_feature (2)..(49): NCBI GI NO: 10434149 NR Description: unnamed protein product [Homo sapiens]
  misc_feature (2)..(49): NCBI GI NO: 19335712 NR Description: probable transport protein Sec61 alpha subunit
  misc_feature (2)..(49): NCBI GI NO: 10946604 NR Description: SEC61, alpha subunit 2 (S
ITRTDKVRALREAFYRQNLPNVTNLLATVLVFLIVIYFRGFRVVLPVRSK

SEQ ID NO: 41410 - DNA, 550 bp, Zea mays subsp. mays
  misc_feature (1)..(550): Ceres Seq. ID no. 13492331
gtctttgatgacattggtgacattgacaaagctgttgaatggaccatgtttgggatcttcgcgaatgctggtcaagtctgcagtgctacttctcgtttactgctgcatgagaaaattgcaaagaaattcttggatagattggttgcatgggcaaagaatataaaagtctcagatccactggaggaaggctgcagactgggttcagttatcagtgaaggacagtatgagaagataaagaaattcatctcgactgcaagaagtgaaggtgccacaattctgtatggaggtggccgaccacagcatctcagaagagggttctttcttgaacctacaattataacagatgttagtacgtcaatgcaaatttggcaagaggaagtctttggaccagtcatctgtgttaaggagtttaggacagagagtgaagctgtggaacttgcaaatgatactcactatggtttagctggtgccgtgatctccaatgatcaagagaggtgtgagcgcatttcaaaggctcttcactctggtattatttggataaattgctcgc

SEQ ID NO: 41411 - protein, 183 aa, Zea mays subsp. mays
  peptide (1)..(183): Ceres Seq. ID no. 13492332
  misc_feature (1)..(182): NCBI GI NO: 17017285 NR Description: betaine aldehyde dehydrogenase [Zea mays]
  misc_feature (1)..(182): NCBI GI NO: 3913464 NR Description: Betaine-aldehyde dehydrogenase (BADH)
  misc_feature (1)..(182): NCBI GI NO: 15147873 NR Description: betaine aldehyde dehydrogenase
  misc_feature (1)..(182): NCBI GI NO: 7431476 NR Description: betaine-aldehyde dehydrogenase (EC 1
  misc_feature (2)..(182): NCBI GI NO: 2494073 NR Description: Betaine-aldehyde dehydrogenase (BADH)
  misc_feature (1)..(182): NCBI GI NO: 21747870 NR Description: betaine-aldehyde dehydrogenase [Triticum aestivum]
  misc_feature (1)..(182): NCBI GI NO: 30698520 NR Description: betaine aldehyde dehydrogenase
  misc_feature (1)..(182): NCBI GI NO: 34904988 NR Description: P0456B03.1
  misc_feature (1)..(182): NCBI GI NO: 15147871 NR Description: betaine aldehyde dehydrogenase
  misc_feature (1)..(182): NCBI GI NO: 40850676 NR Description: betaine-aldehyde dehydrogenase
VFDDIGDIDKAVEWTMFGIFANAGQVCSATSRLLLHEKIAKKFLDRLVAWAKNIKVSDPLEEGCRLGSVISEGQYEKIKKFISTARSEGATILYGGGRPQHLRRGFFLEPTIITDVSTSMQIWQEEVFGPVICVKEFRTESEAVELANDTHYGLAGAVISNDQERCERISKALHSGIIWINCS

SEQ ID NO: 41412 - protein, 168 aa, Zea mays subsp. mays
  peptide (1)..(168): Ceres Seq. ID no. 13492333
  misc_feature (1)..(167): NCBI GI NO: 17017285 NR Description: betaine aldehyde dehydrogenase [Zea mays]
  misc_feature (1)..(167): NCBI GI NO: 3913464 NR Description: Betaine-aldehyde dehydrogenase (BADH)
  misc_feature (1)..(167): NCBI GI NO: 15147873 NR Description: betaine aldehyde dehydrogenase
  misc_feature (1)..(167): NCBI GI NO: 7431476 NR Description: betaine-aldehyde dehydrogenase (EC 1
  misc_feature (1)..(167): NCBI GI NO: 2494073 NR Description: Betaine-aldehyde dehydrogenase (BADH)
  misc_feature (1)..(167): NCBI GI NO: 21747870 NR Description: betaine-aldehyde dehydrogenase [Triticum aestivum]
  misc_feature (1)..(167): NCBI GI NO: 30698520 NR Description: betaine aldehyde dehydrogenase
  misc_feature (1)..(167): NCBI GI NO: 34904988 NR Description: P0456B03.1
  misc_feature (1)..(167): NCBI GI NO: 15147871 NR Description: betaine aldehyde dehydrogenase
  misc_feature (1)..(167): NCBI GI NO: 40850676 NR Description: betaine-aldehyde dehydrogenase
MFGIFANAGQVCSATSRLLLHEKIAKKFLDRLVAWAKNIKVSDPLEEGCRLGSVISEGQYEKIKKFISTARSEGATILYGGGRPQHLRRGFFLEPTIITDVSTSMQIWQEEVFGPVICVKEFRTESEAVELANDTHYGLAGAVISNDQERCERISKALHSGIIWINCS

SEQ ID NO: 41413 - DNA, 947 bp, Zea mays subsp. mays; identical to SEQ ID NO: 40494
  misc_feature (1)..(947): Ceres Seq. ID no. 12633396

SEQ ID NO: 41414 - protein, 86 aa, Zea mays subsp. mays; identical to SEQ ID NO: 40495
  peptide (1)..(86): Ceres Seq. ID no. 12633397
  misc_feature (1)..(86): NCBI GI NO: 29367503 NR Description: putative ubiquitin-specific protease
  misc_feature (1)..(75): NCBI GI NO: 9758368 NR Description: contains similarity to deubiquitinatingenzyme~gene_id:MTI20
  misc_feature (1)..(75): NCBI GI NO: 11993486 NR Description: ubiquitin-specific protease 23
  misc_feature (1)..(75): NCBI GI NO: 18424054 NR Description: ubiquitin-specific protease 23

SEQ ID NO: 41415 - protein, 82 aa, Zea mays subsp. mays; identical to SEQ ID NO: 40496
  peptide (1)..(82): Ceres Seq. ID no. 12633398

SEQ ID NO: 41416 - protein, 50 aa, Zea mays subsp. mays; identical to SEQ ID NO: 40497
  peptide (1)..(50): Ceres Seq. ID no. 12633399

SEQ ID NO: 41417 - DNA, 1283 bp, Zea mays subsp. mays; identical to SEQ ID NO: 31255
  misc_feature (1)..(1283): Ceres Seq. ID no. 13494816

SEQ ID NO: 41418 - protein, 234 aa, Zea mays subsp. mays; identical to SEQ ID NO: 31256
  peptide (1)..(234): Ceres Seq. ID no. 13494817
  misc_feature (9)..(84): Pfam Name: Pfam Description:  Uncharacterized protein family UPF0016
  misc_feature (4)..(228): NCBI GI NO: 15221462 NR Description: transmembrane protein -related
  misc_feature (4)..(231): NCBI GI NO: 15222613 NR Description: transmembrane protein -related
  misc_feature (4)..(231): NCBI GI NO: 21593636 NR Description: transmembrane protein, putative
  misc_feature (1)..(231): NCBI GI NO: 6755853 NR Description: TPA regulated locus [Mus musculus]
  misc_feature (1)..(231): NCBI GI NO: 7684611 NR Description: TPARDL [Mus musculus]
  misc_feature (1)..(231): NCBI GI NO: 21357589 NR Description: CG4196-PC [Drosophila melanogaster]
  misc_feature (1)..(174): NCBI GI NO: 34877387 NR Description: similar to probable transmembrane protein FT27 -mouse
  misc_feature (170)..(231): NCBI GI NO: 34877387 NR Description: similar to probable transmembrane protein FT27 -mouse
  misc_feature (4)..(226): NCBI GI NO: 17556152 NR Description: Uncharacterized protein family UPF0016 (32.1 kD)
  misc_feature (2)..(230): NCBI GI NO: 18421551 NR Description: transmembrane protein FT27/PFT27-related

SEQ ID NO: 41419 - protein, 220 aa, Zea mays subsp. mays; identical to SEQ ID NO: 31257
  peptide (1)..(220): Ceres Seq. ID no. 13494818
  misc_feature (1)..(70): Pfam Name: Pfam Description:  Uncharacterized protein family UPF0016
  misc_feature (1)..(214): NCBI GI NO: 15221462 NR Description: transmembrane protein -related
  misc_feature (1)..(217): NCBI GI NO: 15222613 NR Description: transmembrane protein -related
  misc_feature (1)..(217): NCBI GI NO: 21593636 NR Description: transmembrane protein, putative
  misc_feature (1)..(217): NCBI GI NO: 6755853 NR Description: TPA regulated locus [Mus musculus]
  misc_feature (1)..(217): NCBI GI NO: 7684611 NR Description: TPARDL [Mus musculus]
  misc_feature (1)..(217): NCBI GI NO: 21357589 NR Description: CG4196-PC [Drosophila melanogaster]
  misc_feature (1)..(160): NCBI GI NO: 34877387 NR Description: similar to probable transmembrane protein FT27 -mouse
  misc_feature (156)..(217): NCBI GI NO: 34877387 NR Description: similar to probable transmembrane protein FT27 -mouse
  misc_feature (1)..(212): NCBI GI NO: 17556152 NR Description: Uncharacterized protein family UPF0016 (32.1 kD)
  misc_feature (1)..(216): NCBI GI NO: 18421551 NR Description: transmembrane protein FT27/PFT27-related

SEQ ID NO: 41420 - protein, 201 aa, Zea mays subsp. mays; identical to SEQ ID NO: 31258
  peptide (1)..(201): Ceres Seq. ID no. 13494819
  misc_feature (1)..(51): Pfam Name: Pfam Description:  Uncharacterized protein family UPF0016
  misc_feature (1)..(195): NCBI GI NO: 15221462 NR Description: transmembrane protein -related
  misc_feature (1)..(198): NCBI GI NO: 15222613 NR Description: transmembrane protein -related
  misc_feature (1)..(198): NCBI GI NO: 21593636 NR Description: transmembrane protein, putative
  misc_feature (1)..(198): NCBI GI NO: 6755853 NR Description: TPA regulated locus [Mus musculus]
  misc_feature (1)..(198): NCBI GI NO: 7684611 NR Description: TPARDL [Mus musculus]
  misc_feature (1)..(198): NCBI GI NO: 21357589 NR Description: CG4196-PC [Drosophila melanogaster]
  misc_feature (1)..(141): NCBI GI NO: 34877387 NR Description: similar to probable transmembrane protein FT27 -mouse
  misc_feature (137)..(198): NCBI GI NO: 34877387 NR Description: similar to probable transmembrane protein FT27 -mouse
  misc_feature (1)..(193): NCBI GI NO: 17556152 NR Description: Uncharacterized protein family UPF0016 (32.1 kD)
  misc_feature (1)..(197): NCBI GI NO: 18421551 NR Description: transmembrane protein FT27/PFT27-related

SEQ ID NO: 41421 - DNA, 477 bp, Zea mays subsp. mays
  misc_feature (1)..(477): Ceres Seq. ID no. 2084255
aaaaaaattcggtcccttcgtcctctactcctctagtcctctcggctcctcgcagtcgctcactgcgtgcgccaaaagcagcagcagctccagccgtcgccgtctccactctccagtctccaccactgctccgcccgcgccggatcgagggagggcaggcggacgaggaggagggatgagtctcttcgggcttggacgaaaccagaagacattccgccccaagaagagcgctccatcaggtagcaagggagcacagctccgaaagcacatagatgccactctcggcagtggaaaccttagggaagctgtgaggttgcctcctggagaggatatcaatgaatggcttgcggtgaatactgtggatttctttaaccaagttaatatgctgtatggcacactcacagaattttgcacacctgagagctgtccgacaatgacagctggcccaaagtacgagtacagatgggctgatgggtg

SEQ ID NO: 41422 - protein, 158 aa, Zea mays subsp. mays
  peptide (1)..(158): Ceres Seq. ID no. 2084256
  misc_feature (87)..(157): Pfam Name: Pfam Description:  Mob1/phocein family
  misc_feature (59)..(157): NCBI GI NO: 32470635 NR Description: putative Mob1/phocein family protein
  misc_feature (59)..(157): NCBI GI NO: 15242430 NR Description: putative protein; protein id: At5g45550
  misc_feature (59)..(157): NCBI GI NO: 32470654 NR Description: unknown [Solanum bulbocastanum]
  misc_feature (59)..(157): NCBI GI NO: 26449776 NR Description: unknown protein [Arabidopsis thaliana]
  misc_feature (59)..(157): NCBI GI NO: 19309913 NR Description: Mob1-like protein [Medicago sativa subsp. falcata]
  misc_feature (67)..(157): NCBI GI NO: 15234110 NR Description: putative protein; protein id: At4g19050.1
  misc_feature (66)..(157): NCBI GI NO: 37534032 NR Description: putative F-box protein family
  misc_feature (81)..(157): NCBI GI NO: 10800806 NR Description: hypothetical protein [Cicer arietinum]
  misc_feature (61)..(157): NCBI GI NO: 27735029 NR Description: hypothetical protein LOC92597 [Homo sapiens]
  misc_feature (61)..(157): NCBI GI NO: 28277885 NR Description: Similar to hypothetical protein LOC92597
KKFGPFVLYSSSPLGSSQSLTACAKSSSSSSRRRLHSPVSTTAPPAPDRGRAGGRGGGMSLFGLGRNQKTFRPKKSAPSGSKGAQLRKHIDATLGSGNLREAVRLPPGEDINEWLAVNTVDFFNQVNMLYGTLTEFCTPESCPTMTAGPKYEYRWADG

SEQ ID NO: 41423 - protein, 100 aa, Zea mays subsp. mays
  peptide (1)..(100): Ceres Seq. ID no. 2084257
  misc_feature (29)..(99): Pfam Name: Pfam Description:  Mob1/phocein family
  misc_feature (1)..(99): NCBI GI NO: 32470635 NR Description: putative Mob1/phocein family protein
  misc_feature (1)..(99): NCBI GI NO: 15242430 NR Description: putative protein; protein id: At5g45550
  misc_feature (1)..(99): NCBI GI NO: 32470654 NR Description: unknown [Solanum bulbocastanum]
  misc_feature (1)..(99): NCBI GI NO: 26449776 NR Description: unknown protein [Arabidopsis thaliana]
  misc_feature (1)..(99): NCBI GI NO: 19309913 NR Description: Mob1-like protein [Medicago sativa subsp. falcata]
  misc_feature (9)..(99): NCBI GI NO: 15234110 NR Description: putative protein; protein id: At4g19050.1
  misc_feature (8)..(99): NCBI GI NO: 37534032 NR Description: putative F-box protein family
  misc_feature (23)..(99): NCBI GI NO: 10800806 NR Description: hypothetical protein [Cicer arietinum]
  misc_feature (3)..(99): NCBI GI NO: 27735029 NR Description: hypothetical protein LOC92597 [Homo sapiens]
  misc_feature (3)..(99): NCBI GI NO: 28277885 NR Description: Similar to hypothetical protein LOC92597
MSLFGLGRNQKTFRPKKSAPSGSKGAQLRKHIDATLGSGNLREAVRLPPGEDINEWLAVNTVDFFNQVNMLYGTLTEFCTPESCPTMTAGPKYEYRWADG

SEQ ID NO: 41424 - DNA, 730 bp, Zea mays subsp. mays
  misc_feature (1)..(730): Ceres Seq. ID no. 13492334
cgaatgatcttaaaaccacagatgttctggatcgttgcttcatggagctgctgaaagccataaacagcagtctgaatgatttgaagaaactgcaacagaaaatagaacagcaaaagaagaaacagcaacagcagaagaagcagcaacagaagcaacagcaattgcaaaaacagccagaacattatattcaagctctgattgcactggaaatagaacttaaaaataaactgtctatacttggtctgatgccatcttcatctttggcagaggtactgaagcaattgaaggacaaagcactaaagagagcggggctgactgaagaaaaattgcaagagcagattgagcagagaaacgttgcaaggaagaataaacagtttgagatatctgatggaatcaggaaaaaccttgctaccaagggcatcgccctgatggatgaaccttctggtacagtgtggagaccatgcgaaccagaggggccgcacccactcaacaaatgatggtaaaatgagatttttgcctgagggcagctacacattttgaactaacaaaatcaccatctctggatgcagtattcttcactcaggggtagggggtccaggttgactcgccagtcgccagttgaaacttgcatttctggttgtgtaagaagcaatggaccccatatatatactttactccttgcgaggtttgagttttggttttggatataagacttggcaattccatttca

SEQ ID NO: 41425 - protein, 164 aa, Zea mays subsp. mays
  peptide (1)..(164): Ceres Seq. ID no. 13492335
  misc_feature (22)..(157): NCBI GI NO: 37535144 NR Description: putative cysteinyl-tRNA synthetase
  misc_feature (63)..(156): NCBI GI NO: 18402580 NR Description: cysteinyl-tRNA synthetase -related
  misc_feature (63)..(156): NCBI GI NO: 25293240 NR Description: probable cysteinyl-tRNA synthetase
  misc_feature (26)..(156): NCBI GI NO: 15228880 NR Description: cysteine-tRNA ligase-related protein
  misc_feature (7)..(156): NCBI GI NO: 9758060 NR Description: cysteine-tRNA ligase [Arabidopsis thaliana]
  misc_feature (7)..(156): NCBI GI NO: 15241557 NR Description: cysteine-tRNA ligase -related protein
NDLKTTDVLDRCFMELLKAINSSLNDLKKLQQKIEQQKKKQQQQKKQQQKQQQLQKQPEHYIQALIALEIELKNKLSILGLMPSSSLAEVLKQLKDKALKRAGLTEEKLQEQIEQRNVARKNKQFEISDGIRKNLATKGIALMDEPSGTVWRPCEPEGPHPLNK

SEQ ID NO: 41426 - protein, 151 aa, Zea mays subsp. mays
  peptide (1)..(151): Ceres Seq. ID no. 13492336
  misc_feature (9)..(144): NCBI GI NO: 37535144 NR Description: putative cysteinyl-tRNA synthetase
  misc_feature (50)..(143): NCBI GI NO: 18402580 NR Description: cysteinyl-tRNA synthetase -related
  misc_feature (50)..(143): NCBI GI NO: 25293240 NR Description: probable cysteinyl-tRNA synthetase
  misc_feature (13)..(143): NCBI GI NO: 15228880 NR Description: cysteine-tRNA ligase-related protein
  misc_feature (1)..(143): NCBI GI NO: 9758060 NR Description: cysteine-tRNA ligase [Arabidopsis thaliana]
  misc_feature (1)..(143): NCBI GI NO: 15241557 NR Description: cysteine-tRNA ligase -related protein
MELLKAINSSLNDLKKLQQKIEQQKKKQQQQKKQQQKQQQLQKQPEHYIQALIALEIELKNKLSILGLMPSSSLAEVLKQLKDKALKRAGLTEEKLQEQIEQRNVARKNKQFEISDGIRKNLATKGIALMDEPSGTVWRPCEPEGPHPLNK

SEQ ID NO: 41427 - protein, 83 aa, Zea mays subsp. mays
  peptide (1)..(83): Ceres Seq. ID no. 13492337
  misc_feature (1)..(76): NCBI GI NO: 37535144 NR Description: putative cysteinyl-tRNA synthetase
  misc_feature (1)..(75): NCBI GI NO: 18402580 NR Description: cysteinyl-tRNA synthetase -related
  misc_feature (1)..(75): NCBI GI NO: 25293240 NR Description: probable cysteinyl-tRNA synthetase
  misc_feature (1)..(75): NCBI GI NO: 15228880 NR Description: cysteine-tRNA ligase-related protein
  misc_feature (1)..(75): NCBI GI NO: 9758060 NR Description: cysteine-tRNA ligase [Arabidopsis thaliana]
  misc_feature (1)..(75): NCBI GI NO: 15241557 NR Description: cysteine-tRNA ligase -related protein
MPSSSLAEVLKQLKDKALKRAGLTEEKLQEQIEQRNVARKNKQFEISDGIRKNLATKGIALMDEPSGTVWRPCEPEGPHPLNK

SEQ ID NO: 41428 - DNA, 935 bp, Zea mays subsp. mays; identical to SEQ ID NO: 19809
  misc_feature (1)..(935): Ceres Seq. ID no. 12636872

SEQ ID NO: 41429 - protein, 242 aa, Zea mays subsp. mays; identical to SEQ ID NO: 19810
  peptide (1)..(242): Ceres Seq. ID no. 12636873
  misc_feature (60)..(236): NCBI GI NO: 15241108 NR Description: putative protein; protein id: At5g27990
  misc_feature (64)..(211): NCBI GI NO: 23613422 NR Description: hypothetical protein [Plasmodium falciparum 3D7]
  misc_feature (61)..(232): NCBI GI NO: 27545344 NR Description: hypothetical protein DT1P1A10 (human) - like
  misc_feature (77)..(232): NCBI GI NO: 24308388 NR Description: hypothetical protein DT1P1A10 [Homo sapiens]
  misc_feature (45)..(216): NCBI GI NO: 40745755 NR Description: hypothetical protein AN2079.2
  misc_feature (67)..(232): NCBI GI NO: 19483873 NR Description: Similar to hypothetical protein DT1P1A10
  misc_feature (67)..(232): NCBI GI NO: 30424736 NR Description: RIKEN cDNA 2310007F12 [Mus musculus]
  misc_feature (67)..(232): NCBI GI NO: 27708338 NR Description: similar to hypothetical protein DT1P1A10

SEQ ID NO: 41430 - protein, 195 aa, Zea mays subsp. mays; identical to SEQ ID NO: 19811
  peptide (1)..(195): Ceres Seq. ID no. 12636874
  misc_feature (13)..(189): NCBI GI NO: 15241108 NR Description: putative protein; protein id: At5g27990
  misc_feature (17)..(164): NCBI GI NO: 23613422 NR Description: hypothetical protein [Plasmodium falciparum 3D7]
  misc_feature (14)..(185): NCBI GI NO: 27545344 NR Description: hypothetical protein DT1P1A10 (human) - like
  misc_feature (30)..(185): NCBI GI NO: 24308388 NR Description: hypothetical protein DT1P1A10 [Homo sapiens]
  misc_feature (1)..(169): NCBI GI NO: 40745755 NR Description: hypothetical protein AN2079.2
  misc_feature (20)..(185): NCBI GI NO: 19483873 NR Description: Similar to hypothetical protein DT1P1A10
  misc_feature (20)..(185): NCBI GI NO: 30424736 NR Description: RIKEN cDNA 2310007F12 [Mus musculus]
  misc_feature (20)..(185): NCBI GI NO: 27708338 NR Description: similar to hypothetical protein DT1P1A10

SEQ ID NO: 41431 - protein, 161 aa, Zea mays subsp. mays; identical to SEQ ID NO: 19812
  peptide (1)..(161): Ceres Seq. ID no. 12636875
  misc_feature (1)..(155): NCBI GI NO: 15241108 NR Description: putative protein; protein id: At5g27990
  misc_feature (1)..(130): NCBI GI NO: 23613422 NR Description: hypothetical protein [Plasmodium falciparum 3D7]
  misc_feature (1)..(151): NCBI GI NO: 27545344 NR Description: hypothetical protein DT1P1A10 (human) - like
  misc_feature (1)..(151): NCBI GI NO: 24308388 NR Description: hypothetical protein DT1P1A10 [Homo sapiens]
  misc_feature (1)..(135): NCBI GI NO: 40745755 NR Description: hypothetical protein AN2079.2
  misc_feature (1)..(151): NCBI GI NO: 19483873 NR Description: Similar to hypothetical protein DT1P1A10
  misc_feature (1)..(151): NCBI GI NO: 30424736 NR Description: RIKEN cDNA 2310007F12 [Mus musculus]
  misc_feature (1)..(151): NCBI GI NO: 27708338 NR Description: similar to hypothetical protein DT1P1A10

SEQ ID NO: 41432 - DNA, 457 bp, Zea mays subsp. mays
  misc_feature (1)..(457): Ceres Seq. ID no. 2085619
taagttgtatgcatatcagatgtgccgtgcgcttgcttacatccatcgagttgtcggtgtgtgtcatcgtgatattaaacctcaaaatctactggtcaatcctcatacacatcaacttaagatttgtgattttgggagcgctaaaaaattggtccctggtgagcctaacatatcgtacatttgctcgcggtattatagggctcctgaactaatatttggagctacggagtataccactgcgatcgatatctggtctgttggctgtgtagtggctgagcttctgattggtcagcctttgtttcctggtgaaagtggtgttgaccaactggtggaaataataaagattttgggtactccaacaagagaggagatcaggtgcatgaatccaaattattccgaattcaagttccctcagataaaagcccatccatggcacaagctttttggtaagcgcatg

SEQ ID NO: 41433 - protein, 152 aa, Zea mays subsp. mays
  peptide (1)..(152): Ceres Seq. ID no. 2085620
  misc_feature (1)..(151): Pfam Name: Pfam Description:  Protein kinase domain
  misc_feature (1)..(151): NCBI GI NO: 37536168 NR Description: putative shaggy-like kinase
  misc_feature (1)..(151): NCBI GI NO: 481018 NR Description: protein kinase MSK-3 (EC 2.7.1.-)
  misc_feature (1)..(151): NCBI GI NO: 7434282 NR Description: shaggy protein kinase (EC 2
  misc_feature (1)..(151): NCBI GI NO: 11182434 NR Description: GLYCOGEN SYNTHASE KINASE-3 HOMOLOG MSK-3
  misc_feature (1)..(151): NCBI GI NO: 7434277 NR Description: shaggy protein kinase (EC 2.7.1.-) 91
  misc_feature (1)..(151): NCBI GI NO: 33591204 NR Description: shaggy-related protein kinase 1
  misc_feature (1)..(151): NCBI GI NO: 33591214 NR Description: shaggy-related protein kinase 1
  misc_feature (1)..(151): NCBI GI NO: 33591208 NR Description: shaggy-related protein kinase 3
  misc_feature (1)..(151): NCBI GI NO: 11132756 NR Description: Shaggy-related protein kinase theta (ASK-theta)
  misc_feature (1)..(151): NCBI GI NO: 15236918 NR Description: Shaggy related protein kinase tetha
KLYAYQMCRALAYIHRVVGVCHRDIKPQNLLVNPHTHQLKICDFGSAKKLVPGEPNISYICSRYYRAPELIFGATEYTTAIDIWSVGCVVAELLIGQPLFPGESGVDQLVEIIKILGTPTREEIRCMNPNYSEFKFPQIKAHPWHKLFGKRM

SEQ ID NO: 41434 - protein, 146 aa, Zea mays subsp. mays
  peptide (1)..(146): Ceres Seq. ID no. 2085621
  misc_feature (1)..(145): Pfam Name: Pfam Description:  Protein kinase domain
  misc_feature (1)..(145): NCBI GI NO: 37536168 NR Description: putative shaggy-like kinase
  misc_feature (1)..(145): NCBI GI NO: 481018 NR Description: protein kinase MSK-3 (EC 2.7.1.-)
  misc_feature (1)..(145): NCBI GI NO: 11182434 NR Description: GLYCOGEN SYNTHASE KINASE-3 HOMOLOG MSK-3
  misc_feature (1)..(145): NCBI GI NO: 7434282 NR Description: shaggy protein kinase (EC 2
  misc_feature (1)..(145): NCBI GI NO: 7434277 NR Description: shaggy protein kinase (EC 2.7.1.-) 91
  misc_feature (1)..(145): NCBI GI NO: 33591204 NR Description: shaggy-related protein kinase 1
  misc_feature (1)..(145): NCBI GI NO: 33591208 NR Description: shaggy-related protein kinase 3
  misc_feature (1)..(145): NCBI GI NO: 33591214 NR Description: shaggy-related protein kinase 1
  misc_feature (1)..(145): NCBI GI NO: 11132756 NR Description: Shaggy-related protein kinase theta (ASK-theta)
  misc_feature (1)..(145): NCBI GI NO: 15236918 NR Description: Shaggy related protein kinase tetha
MCRALAYIHRVVGVCHRDIKPQNLLVNPHTHQLKICDFGSAKKLVPGEPNISYICSRYYRAPELIFGATEYTTAIDIWSVGCVVAELLIGQPLFPGESGVDQLVEIIKILGTPTREEIRCMNPNYSEFKFPQIKAHPWHKLFGKRM

SEQ ID NO: 41435 - DNA, 1341 bp, Zea mays subsp. mays
  misc_feature (1)..(1341): Ceres Seq. ID no. 12368476
gcacgagaccattacctagaacatcctaatcgaaaaaaagcggtgggccgcgcttccttcctcagtcctcactactcactcgtccccttccagttccgcttccgatctgcgcttcgatctccctcttcgcagagttgtagagcaatgcttatgaattttgacgagtccatatgtaagttgacaaaatttgctagggagagggactgcaggtgcttgtgagcatgtatctgctaggcaacaaaagtggaaagaagaaagtgtatgtcgattatatgaatgtccctctaccgtatgccatcgaagagaattacggtgggcgcttctttgacgacgacgacgatcttgcccaagttcttcaagatcaggaaatattgtatcatttaattcaaggaagtaatggtggtggttcatctagaactcattcgattccaagttctagctatggccatgatcggacatcaaatgcacaaaaattgtcaggagatgtaaactgtgagtgtgagttgcaactagcagttgatgaagctttagctagagagttgcatgaaatggagagcaaactagccaacacttcacttaatgacaataatcgaagaaagacaacatcatcttcagcatttgatagaggcaataattctgcaagtagacctcctcaggtattggaggaggatgtgattgatccagataatatgacgtatgaggaactgcaacagctaggggaagccattggtacccaaagcaaagggctgcctgaaagtgtcatagcactcttgccaacttcaacttacaaaactgggatattctccagaaaggaaaaacatgatgaatgtgtgatctgttgtatggcatacaagaaccgagataggctgactaaattgccatgtggacatcactaccatcaagcttgtgttgctaaatggttacagatcaataaggtatgccctgtttgcaataaggaggttttcagctagcagtatcaaacagtgcagattcgtctgatggccaactccagcaaccgtctgtagtactgcatagatgtgcattatttgtataagcatgctgccctgttgctggcaggtaatgcgccgcattgctcaaggaccatatcacggccaaattagtgatatctccagcgaaagcaataagatctctgcttttgaactttttgacattcagagtttcagacttggtgccacactacagtcctttttatcatcgcctgtatactattcatttcagtatcttgtctccagtccattcagcatactttctggaatgttgcaacttggattgaaacagcgagaaatgttgaaatttaggcactggtatttttttaaagtg

SEQ ID NO: 41436 - protein, 249 aa, Zea mays subsp. mays
  peptide (1)..(249): Ceres Seq. ID no. 12368477
  misc_feature (203)..(243): Pfam Name: RING finger Pfam Description: Zinc finger, C3HC4 type
  misc_feature (1)..(248): NCBI GI NO: 38567912 NR Description: OSJNBa0088I22.8
  misc_feature (1)..(248): NCBI GI NO: 34898016 NR Description: ESTs C26000
  misc_feature (17)..(248): NCBI GI NO: 22331928 NR Description: putative protein; protein id: At3g63530.1
  misc_feature (100)..(247): NCBI GI NO: 10334499 NR Description: hypothetical protein [Cicer arietinum]
  misc_feature (83)..(247): NCBI GI NO: 18402411 NR Description: expressed protein; protein id: At3g19910
  misc_feature (83)..(247): NCBI GI NO: 21536693 NR Description: unknown [Arabidopsis thaliana]
  misc_feature (148)..(246): NCBI GI NO: 15232746 NR Description: zinc-finger protein-like protein
  misc_feature (78)..(239): NCBI GI NO: 15242286 NR Description: unknown protein; protein id: At5g52150.1
  misc_feature (152)..(243): NCBI GI NO: 1076498 NR Description: RING finger protein Pzf - soybean (fragment)
  misc_feature (152)..(247): NCBI GI NO: 4240031 NR Description: DNA binding zinc finger protein (Pspzf)
MYLLGNKSGKKKVYVDYMNVPLPYAIEENYGGRFFDDDDDLAQVLQDQEILYHLIQGSNGGGSSRTHSIPSSSYGHDRTSNAQKLSGDVNCECELQLAVDEALARELHEMESKLANTSLNDNNRRKTTSSSAFDRGNNSASRPPQVLEEDVIDPDNMTYEELQQLGEAIGTQSKGLPESVIALLPTSTYKTGIFSRKEKHDECVICCMAYKNRDRLTKLPCGHHYHQACVAKWLQINKVCPVCNKEVFS

SEQ ID NO: 41437 - protein, 232 aa, Zea mays subsp. mays
  peptide (1)..(232): Ceres Seq. ID no. 12368478
  misc_feature (186)..(226): Pfam Name: RING finger Pfam Description: Zinc finger, C3HC4 type
  misc_feature (1)..(231): NCBI GI NO: 38567912 NR Description: OSJNBa0088I22.8
  misc_feature (1)..(231): NCBI GI NO: 34898016 NR Description: ESTs C26000
  misc_feature (1)..(231): NCBI GI NO: 22331928 NR Description: putative protein; protein id: At3g63530.1
  misc_feature (83)..(230): NCBI GI NO: 10334499 NR Description: hypothetical protein [Cicer arietinum]
  misc_feature (66)..(230): NCBI GI NO: 18402411 NR Description: expressed protein; protein id: At3g19910
  misc_feature (66)..(230): NCBI GI NO: 21536693 NR Description: unknown [Arabidopsis thaliana]
  misc_feature (131)..(229): NCBI GI NO: 15232746 NR Description: zinc-finger protein-like protein
  misc_feature (61)..(222): NCBI GI NO: 15242286 NR Description: unknown protein; protein id: At5g52150.1
  misc_feature (135)..(226): NCBI GI NO: 1076498 NR Description: RING finger protein Pzf - soybean (fragment)
  misc_feature (135)..(230): NCBI GI NO: 4240031 NR Description: DNA binding zinc finger protein (Pspzf)
MNVPLPYAIEENYGGRFFDDDDDLAQVLQDQEILYHLIQGSNGGGSSRTHSIPSSSYGHDRTSNAQKLSGDVNCECELQLAVDEALARELHEMESKLANTSLNDNNRRKTTSSSAFDRGNNSASRPPQVLEEDVIDPDNMTYEELQQLGEAIGTQSKGLPESVIALLPTSTYKTGIFSRKEKHDECVICCMAYKNRDRLTKLPCGHHYHQACVAKWLQINKVCPVCNKEVFS

SEQ ID NO: 41438 - protein, 140 aa, Zea mays subsp. mays
  peptide (1)..(140): Ceres Seq. ID no. 12368479
  misc_feature (94)..(134): Pfam Name: RING finger Pfam Description: Zinc finger, C3HC4 type
  misc_feature (1)..(139): NCBI GI NO: 38567912 NR Description: OSJNBa0088I22.8
  misc_feature (1)..(139): NCBI GI NO: 34898016 NR Description: ESTs C26000
  misc_feature (1)..(139): NCBI GI NO: 22331928 NR Description: putative protein; protein id: At3g63530.1
  misc_feature (1)..(138): NCBI GI NO: 10334499 NR Description: hypothetical protein [Cicer arietinum]
  misc_feature (1)..(138): NCBI GI NO: 18402411 NR Description: expressed protein; protein id: At3g19910
  misc_feature (1)..(138): NCBI GI NO: 21536693 NR Description: unknown [Arabidopsis thaliana]
  misc_feature (39)..(137): NCBI GI NO: 15232746 NR Description: zinc-finger protein-like protein
  misc_feature (1)..(130): NCBI GI NO: 15242286 NR Description: unknown protein; protein id: At5g52150.1
  misc_feature (43)..(134): NCBI GI NO: 1076498 NR Description: RING finger protein Pzf - soybean (fragment)
  misc_feature (43)..(138): NCBI GI NO: 4240031 NR Description: DNA binding zinc finger protein (Pspzf)
MESKLANTSLNDNNRRKTTSSSAFDRGNNSASRPPQVLEEDVIDPDNMTYEELQQLGEAIGTQSKGLPESVIALLPTSTYKTGIFSRKEKHDECVICCMAYKNRDRLTKLPCGHHYHQACVAKWLQINKVCPVCNKEVFS

SEQ ID NO: 41439 - DNA, 1473 bp, Zea mays subsp. mays; identical to SEQ ID NO: 31354
  misc_feature (1)..(1473): Ceres Seq. ID no. 12347344

SEQ ID NO: 41440 - protein, 389 aa, Zea mays subsp. mays; identical to SEQ ID NO: 31355
  peptide (1)..(389): Ceres Seq. ID no. 12347345
  misc_feature (105)..(166): Pfam Name: Pfam Description:  Dof domain, zinc finger
  misc_feature (31)..(291): NCBI GI NO: 20372847 NR Description: dof zinc finger protein
  misc_feature (31)..(291): NCBI GI NO: 20372895 NR Description: dof zinc finger protein
  misc_feature (289)..(389): NCBI GI NO: 20372847 NR Description: dof zinc finger protein
  misc_feature (289)..(389): NCBI GI NO: 20372895 NR Description: dof zinc finger protein
  misc_feature (36)..(311): NCBI GI NO: 4996642 NR Description: Dof zinc finger protein [Oryza sativa]
  misc_feature (36)..(388): NCBI GI NO: 4996640 NR Description: Dof zinc finger protein [Oryza sativa]
  misc_feature (45)..(388): NCBI GI NO: 38344272 NR Description: OSJNBa0005N02.10
  misc_feature (49)..(387): NCBI GI NO: 4996642 NR Description: Dof zinc finger protein [Oryza sativa]
  misc_feature (140)..(381): NCBI GI NO: 4996640 NR Description: Dof zinc finger protein [Oryza sativa]
  misc_feature (140)..(381): NCBI GI NO: 38344272 NR Description: OSJNBa0005N02.10

SEQ ID NO: 41441 - protein, 348 aa, Zea mays subsp. mays; identical to SEQ ID NO: 31356
  peptide (1)..(348): Ceres Seq. ID no. 12347346
  misc_feature (64)..(125): Pfam Name: Pfam Description:  Dof domain, zinc finger
  misc_feature (1)..(250): NCBI GI NO: 20372847 NR Description: dof zinc finger protein
  misc_feature (1)..(250): NCBI GI NO: 20372895 NR Description: dof zinc finger protein
  misc_feature (248)..(348): NCBI GI NO: 20372847 NR Description: dof zinc finger protein
  misc_feature (248)..(348): NCBI GI NO: 20372895 NR Description: dof zinc finger protein
  misc_feature (1)..(270): NCBI GI NO: 4996642 NR Description: Dof zinc finger protein [Oryza sativa]
  misc_feature (1)..(347): NCBI GI NO: 4996640 NR Description: Dof zinc finger protein [Oryza sativa]
  misc_feature (4)..(347): NCBI GI NO: 38344272 NR Description: OSJNBa0005N02.10
  misc_feature (8)..(346): NCBI GI NO: 4996642 NR Description: Dof zinc finger protein [Oryza sativa]
  misc_feature (99)..(340): NCBI GI NO: 4996640 NR Description: Dof zinc finger protein [Oryza sativa]
  misc_feature (99)..(340): NCBI GI NO: 38344272 NR Description: OSJNBa0005N02.10

SEQ ID NO: 41442 - protein, 345 aa, Zea mays subsp. mays; identical to SEQ ID NO: 31357
  peptide (1)..(345): Ceres Seq. ID no. 12347347
  misc_feature (61)..(122): Pfam Name: Pfam Description:  Dof domain, zinc finger
  misc_feature (1)..(247): NCBI GI NO: 20372847 NR Description: dof zinc finger protein
  misc_feature (1)..(247): NCBI GI NO: 20372895 NR Description: dof zinc finger protein
  misc_feature (245)..(345): NCBI GI NO: 20372847 NR Description: dof zinc finger protein
  misc_feature (245)..(345): NCBI GI NO: 20372895 NR Description: dof zinc finger protein
  misc_feature (1)..(267): NCBI GI NO: 4996642 NR Description: Dof zinc finger protein [Oryza sativa]
  misc_feature (1)..(344): NCBI GI NO: 4996640 NR Description: Dof zinc finger protein [Oryza sativa]
  misc_feature (1)..(344): NCBI GI NO: 38344272 NR Description: OSJNBa0005N02.10
  misc_feature (5)..(343): NCBI GI NO: 4996642 NR Description: Dof zinc finger protein [Oryza sativa]
  misc_feature (96)..(337): NCBI GI NO: 4996640 NR Description: Dof zinc finger protein [Oryza sativa]
  misc_feature (96)..(337): NCBI GI NO: 38344272 NR Description: OSJNBa0005N02.10

SEQ ID NO: 41443 - DNA, 447 bp, Zea mays subsp. mays
  misc_feature (1)..(447): Ceres Seq. ID no. 2121480
ttgataaggaaaatctcatcaaatatgggaaccattcgttgacctatagaatagttgatagaattttcgcacagatcccaaggaaattcacaagcatgacagaaggaaagatgggttatgaagactttgtttactttatattatcagaggaagacaaatcatctgagcctagtcttgaatactggtttaagtgcatcgatcttgatggtaatggtattttaactttcaatgaaatgcaatttttctacgaggagcaattgcaccgaatggagtgcatggcacaagagcctgtgctttttctggacatattatgccagatgattgatatgattggaccagagaatgagagctatttaactctacgggacttaaaacggtgtaaactctcaggaaacatattcaatattcttttcaatctcaacaagttcatggcgtttgaaactcgtg

SEQ ID NO: 41444 - protein, 148 aa, Zea mays subsp. mays
  peptide (1)..(148): Ceres Seq. ID no. 2121481
  misc_feature (57)..(85): Pfam Name: Pfam Description:  EF hand
  misc_feature (1)..(147): NCBI GI NO: 16905168 NR Description: putative phosphatase subunit, 3'-partial
  misc_feature (1)..(147): NCBI GI NO: 37535364 NR Description: putative protein phosphatase 2A regulatory subunit
  misc_feature (1)..(147): NCBI GI NO: 18421273 NR Description: protein phosphatase 2A regulatory subunit B-likeprotein
  misc_feature (1)..(147): NCBI GI NO: 30692025 NR Description: protein phosphatase 2A regulatory subunit B-relatedprotein
  misc_feature (1)..(147): NCBI GI NO: 15241978 NR Description: protein phosphatase 2A regulatory subunit B-likeprotein
  misc_feature (1)..(147): NCBI GI NO: 15221817 NR Description: protein phosphatase 2A 72 kDa regulatory subunit
  misc_feature (1)..(147): NCBI GI NO: 15240089 NR Description: protein phosphatase 2A 62 kDa B regulatory subunit
  misc_feature (1)..(147): NCBI GI NO: 15219596 NR Description: putative protein phosphatase 2A
  misc_feature (1)..(147): NCBI GI NO: 28393301 NR Description: putative protein phosphatase 2A
  misc_feature (4)..(147): NCBI GI NO: 34865818 NR Description: similar to alpha isoform of regulatory subunit B
DKENLIKYGNHSLTYRIVDRIFAQIPRKFTSMTEGKMGYEDFVYFILSEEDKSSEPSLEYWFKCIDLDGNGILTFNEMQFFYEEQLHRMECMAQEPVLFLDILCQMIDMIGPENESYLTLRDLKRCKLSGNIFNILFNLNKFMAFETR

SEQ ID NO: 41445 - protein, 117 aa, Zea mays subsp. mays
  peptide (1)..(117): Ceres Seq. ID no. 2121482
  misc_feature (26)..(54): Pfam Name: Pfam Description:  EF hand
  misc_feature (1)..(116): NCBI GI NO: 16905168 NR Description: putative phosphatase subunit, 3'-partial
  misc_feature (1)..(116): NCBI GI NO: 37535364 NR Description: putative protein phosphatase 2A regulatory subunit
  misc_feature (1)..(116): NCBI GI NO: 18421273 NR Description: protein phosphatase 2A regulatory subunit B-likeprotein
  misc_feature (1)..(116): NCBI GI NO: 30692025 NR Description: protein phosphatase 2A regulatory subunit B-relatedprotein
  misc_feature (1)..(116): NCBI GI NO: 15241978 NR Description: protein phosphatase 2A regulatory subunit B-likeprotein
  misc_feature (1)..(116): NCBI GI NO: 15221817 NR Description: protein phosphatase 2A 72 kDa regulatory subunit
  misc_feature (1)..(116): NCBI GI NO: 15240089 NR Description: protein phosphatase 2A 62 kDa B regulatory subunit
  misc_feature (1)..(116): NCBI GI NO: 15219596 NR Description: putative protein phosphatase 2A
  misc_feature (1)..(116): NCBI GI NO: 28393301 NR Description: putative protein phosphatase 2A
  misc_feature (1)..(116): NCBI GI NO: 34865818 NR Description: similar to alpha isoform of regulatory subunit B
MTEGKMGYEDFVYFILSEEDKSSEPSLEYWFKCIDLDGNGILTFNEMQFFYEEQLHRMECMAQEPVLFLDILCQMIDMIGPENESYLTLRDLKRCKLSGNIFNILFNLNKFMAFETR

SEQ ID NO: 41446 - protein, 112 aa, Zea mays subsp. mays
  peptide (1)..(112): Ceres Seq. ID no. 2121483
  misc_feature (21)..(49): Pfam Name: Pfam Description:  EF hand
  misc_feature (1)..(111): NCBI GI NO: 16905168 NR Description: putative phosphatase subunit, 3'-partial
  misc_feature (1)..(111): NCBI GI NO: 37535364 NR Description: putative protein phosphatase 2A regulatory subunit
  misc_feature (1)..(111): NCBI GI NO: 18421273 NR Description: protein phosphatase 2A regulatory subunit B-likeprotein
  misc_feature (1)..(111): NCBI GI NO: 30692025 NR Description: protein phosphatase 2A regulatory subunit B-relatedprotein
  misc_feature (1)..(111): NCBI GI NO: 15241978 NR Description: protein phosphatase 2A regulatory subunit B-likeprotein
  misc_feature (1)..(111): NCBI GI NO: 15221817 NR Description: protein phosphatase 2A 72 kDa regulatory subunit
  misc_feature (1)..(111): NCBI GI NO: 15240089 NR Description: protein phosphatase 2A 62 kDa B regulatory subunit
  misc_feature (1)..(111): NCBI GI NO: 15219596 NR Description: putative protein phosphatase 2A
  misc_feature (1)..(111): NCBI GI NO: 28393301 NR Description: putative protein phosphatase 2A
  misc_feature (1)..(111): NCBI GI NO: 34865818 NR Description: similar to alpha isoform of regulatory subunit B
MGYEDFVYFILSEEDKSSEPSLEYWFKCIDLDGNGILTFNEMQFFYEEQLHRMECMAQEPVLFLDILCQMIDMIGPENESYLTLRDLKRCKLSGNIFNILFNLNKFMAFETR

SEQ ID NO: 41447 - DNA, 1483 bp, Zea mays subsp. mays; identical to SEQ ID NO: 32858
  misc_feature (1)..(1483): Ceres Seq. ID no. 13492502

SEQ ID NO: 41448 - protein, 432 aa, Zea mays subsp. mays; identical to SEQ ID NO: 32859
  peptide (1)..(432): Ceres Seq. ID no. 13492503
  misc_feature (2)..(396): Pfam Name: Pfam Description:  Mlo family
  misc_feature (1)..(396): NCBI GI NO: 13784979 NR Description: seven transmembrane protein Mlo3 [Zea mays]
  misc_feature (5)..(385): NCBI GI NO: 34907492 NR Description: putative seven transmembrane protein
  misc_feature (1)..(377): NCBI GI NO: 13784989 NR Description: seven transmembrane protein Mlo8 [Zea mays]
  misc_feature (3)..(401): NCBI GI NO: 15235429 NR Description: seven transmembrane MLO protein family (MLO1)
  misc_feature (6)..(385): NCBI GI NO: 15224823 NR Description: seven transmembrane MLO protein family (MLO15)
  misc_feature (1)..(385): NCBI GI NO: 18416311 NR Description: seven transmembrane MLO protein family (MLO13)
  misc_feature (119)..(385): NCBI GI NO: 7487333 NR Description: hypothetical protein T22A6
  misc_feature (1)..(84): NCBI GI NO: 7487333 NR Description: hypothetical protein T22A6
  misc_feature (1)..(385): NCBI GI NO: 13784987 NR Description: seven transmembrane protein Mlo7 [Zea mays]
  misc_feature (95)..(377): NCBI GI NO: 13784985 NR Description: seven transmembrane protein Mlo6 [Zea mays]

SEQ ID NO: 41449 - protein, 374 aa, Zea mays subsp. mays; identical to SEQ ID NO: 32860
  peptide (1)..(374): Ceres Seq. ID no. 13492504
  misc_feature (1)..(338): Pfam Name: Pfam Description:  Mlo family
  misc_feature (1)..(338): NCBI GI NO: 13784979 NR Description: seven transmembrane protein Mlo3 [Zea mays]
  misc_feature (1)..(327): NCBI GI NO: 34907492 NR Description: putative seven transmembrane protein
  misc_feature (1)..(319): NCBI GI NO: 13784989 NR Description: seven transmembrane protein Mlo8 [Zea mays]
  misc_feature (1)..(343): NCBI GI NO: 15235429 NR Description: seven transmembrane MLO protein family (MLO1)
  misc_feature (1)..(327): NCBI GI NO: 15224823 NR Description: seven transmembrane MLO protein family (MLO15)
  misc_feature (1)..(327): NCBI GI NO: 18416311 NR Description: seven transmembrane MLO protein family (MLO13)
  misc_feature (61)..(327): NCBI GI NO: 7487333 NR Description: hypothetical protein T22A6
  misc_feature (1)..(26): NCBI GI NO: 7487333 NR Description: hypothetical protein T22A6
  misc_feature (1)..(327): NCBI GI NO: 13784987 NR Description: seven transmembrane protein Mlo7 [Zea mays]
  misc_feature (37)..(319): NCBI GI NO: 13784985 NR Description: seven transmembrane protein Mlo6 [Zea mays]

SEQ ID NO: 41450 - protein, 348 aa, Zea mays subsp. mays; identical to SEQ ID NO: 32861
  peptide (1)..(348): Ceres Seq. ID no. 13492505
  misc_feature (1)..(312): Pfam Name: Pfam Description:  Mlo family
  misc_feature (1)..(312): NCBI GI NO: 13784979 NR Description: seven transmembrane protein Mlo3 [Zea mays]
  misc_feature (1)..(301): NCBI GI NO: 34907492 NR Description: putative seven transmembrane protein
  misc_feature (1)..(293): NCBI GI NO: 13784989 NR Description: seven transmembrane protein Mlo8 [Zea mays]
  misc_feature (1)..(317): NCBI GI NO: 15235429 NR Description: seven transmembrane MLO protein family (MLO1)
  misc_feature (1)..(301): NCBI GI NO: 15224823 NR Description: seven transmembrane MLO protein family (MLO15)
  misc_feature (1)..(301): NCBI GI NO: 18416311 NR Description: seven transmembrane MLO protein family (MLO13)
  misc_feature (35)..(301): NCBI GI NO: 7487333 NR Description: hypothetical protein T22A6
  misc_feature (1)..(301): NCBI GI NO: 13784987 NR Description: seven transmembrane protein Mlo7 [Zea mays]
  misc_feature (11)..(293): NCBI GI NO: 13784985 NR Description: seven transmembrane protein Mlo6 [Zea mays]
  misc_feature (1)..(35): NCBI GI NO: 13784985 NR Description: seven transmembrane protein Mlo6 [Zea mays]

SEQ ID NO: 41451 - DNA, 487 bp, Zea mays subsp. mays
  misc_feature (1)..(487): Ceres Seq. ID no. 4613497
aagttaggaggggaacccatcagccaagagctacgcaaacgcacagcgatgcacaagcacgagataccagccaccatgcgcctgtccctcctcctcgtcgtcgtggccgccctctcggcgcgcaccgcggcgcagctgccgctggcgggcggcggcggcggcgccctgaagccggacttctatagccagtcgtgcccgcgcgcggagcggatcattgcggaggtgatgcagacgaagcagatggcgaacccgacgacggccgcgggcctgctccgcgtcttcttccacgactgcttcgtcagcgggtgcgacgcgtcggtgctgatcgcgtccacccagttccagaagttcggagcacgacgcggagatcaaccactccctccccggggacgccttcgacgccgtggtgcgcgccaagctggccctggagctggagtgcccggggtggtgtcctgcgccgacatcctcgcactggcgtcgggcgtgc

SEQ ID NO: 41452 - protein, 162 aa, Zea mays subsp. mays
  peptide (1)..(162): Ceres Seq. ID no. 4613498
  misc_feature (30)..(160): NCBI GI NO: 32489883 NR Description: OSJNBa0060P14.16
  misc_feature (43)..(160): NCBI GI NO: 9759442 NR Description: peroxidase [Arabidopsis thaliana]
  misc_feature (43)..(160): NCBI GI NO: 18422742 NR Description: peroxidase, putative; protein id: At5g47000
  misc_feature (43)..(160): NCBI GI NO: 21593687 NR Description: peroxidase [Arabidopsis thaliana]
  misc_feature (56)..(160): NCBI GI NO: 15236620 NR Description: peroxidase, putative; protein id: At4g17690.1
  misc_feature (28)..(160): NCBI GI NO: 14702035 NR Description: putative peroxidase
  misc_feature (48)..(160): NCBI GI NO: 7433064 NR Description: peroxidase (EC 1.11.1.7) TPX2 precursor - tomato
  misc_feature (53)..(160): NCBI GI NO: 7433065 NR Description: peroxidase (EC 1
  misc_feature (26)..(160): NCBI GI NO: 34394026 NR Description: putative peroxidase
  misc_feature (56)..(159): NCBI GI NO: 15242580 NR Description: peroxidase, putative; protein id: At5g40150.1
KLGGEPISQELRKRTAMHKHEIPATMRLSLLLVVVAALSARTAAQLPLAGGGGGALKPDFYSQSCPRAERIIAEVMQTKQMANPTTAAGLLRVFFHDCFVSGCDASVLIASTQFQKFGARRGDQPLPPRGRLRRRGARQAGPGAGVPGVVSCADILALASGV

SEQ ID NO: 41453 - protein, 146 aa, Zea mays subsp. mays
  peptide (1)..(146): Ceres Seq. ID no. 4613499
  misc_feature (14)..(144): NCBI GI NO: 32489883 NR Description: OSJNBa0060P14.16
  misc_feature (27)..(144): NCBI GI NO: 9759442 NR Description: peroxidase [Arabidopsis thaliana]
  misc_feature (27)..(144): NCBI GI NO: 21593687 NR Description: peroxidase [Arabidopsis thaliana]
  misc_feature (27)..(144): NCBI GI NO: 18422742 NR Description: peroxidase, putative; protein id: At5g47000
  misc_feature (40)..(144): NCBI GI NO: 15236620 NR Description: peroxidase, putative; protein id: At4g17690.1
  misc_feature (12)..(144): NCBI GI NO: 14702035 NR Description: putative peroxidase
  misc_feature (32)..(144): NCBI GI NO: 7433064 NR Description: peroxidase (EC 1.11.1.7) TPX2 precursor - tomato
  misc_feature (37)..(144): NCBI GI NO: 7433065 NR Description: peroxidase (EC 1
  misc_feature (10)..(144): NCBI GI NO: 34394026 NR Description: putative peroxidase
  misc_feature (40)..(143): NCBI GI NO: 15242580 NR Description: peroxidase, putative; protein id: At5g40150.1
MHKHEIPATMRLSLLLVVVAALSARTAAQLPLAGGGGGALKPDFYSQSCPRAERIIAEVMQTKQMANPTTAAGLLRVFFHDCFVSGCDASVLIASTQFQKFGARRGDQPLPPRGRLRRRGARQAGPGAGVPGVVSCADILALASGV

SEQ ID NO: 41454 - protein, 137 aa, Zea mays subsp. mays
  peptide (1)..(137): Ceres Seq. ID no. 4613500
  misc_feature (5)..(135): NCBI GI NO: 32489883 NR Description: OSJNBa0060P14.16
  misc_feature (18)..(135): NCBI GI NO: 9759442 NR Description: peroxidase [Arabidopsis thaliana]
  misc_feature (18)..(135): NCBI GI NO: 21593687 NR Description: peroxidase [Arabidopsis thaliana]
  misc_feature (18)..(135): NCBI GI NO: 18422742 NR Description: peroxidase, putative; protein id: At5g47000
  misc_feature (31)..(135): NCBI GI NO: 15236620 NR Description: peroxidase, putative; protein id: At4g17690.1
  misc_feature (3)..(135): NCBI GI NO: 14702035 NR Description: putative peroxidase
  misc_feature (23)..(135): NCBI GI NO: 7433064 NR Description: peroxidase (EC 1.11.1.7) TPX2 precursor - tomato
  misc_feature (28)..(135): NCBI GI NO: 7433065 NR Description: peroxidase (EC 1
  misc_feature (1)..(135): NCBI GI NO: 34394026 NR Description: putative peroxidase
  misc_feature (31)..(134): NCBI GI NO: 15242580 NR Description: peroxidase, putative; protein id: At5g40150.1
MRLSLLLVVVAALSARTAAQLPLAGGGGGALKPDFYSQSCPRAERIIAEVMQTKQMANPTTAAGLLRVFFHDCFVSGCDASVLIASTQFQKFGARRGDQPLPPRGRLRRRGARQAGPGAGVPGVVSCADILALASGV

SEQ ID NO: 41455 - DNA, 1585 bp, Zea mays subsp. mays
  misc_feature (1)..(1585): Ceres Seq. ID no. 12418694
gcacgagaccattacctagaacatcctaatcgaaaaacgtgaccccgaggcccgagcccgaagcggcggcgcgccgggcgtcttgacgtccccaatgacgccgcgcgtcgtggacggacctccgcagcttccctctcgtccgttccgcagtccgcacggggaggggagctacagcgacctaccgccgaggcgggccccaaccgcaccacgcctacttcaaaccctctcccacccccacctcctgccgttctcggaggggatcaagttcgcttctgcctgcgtgctctgctggagagctagatggcgatgccgtccgggtggaggggtatcctgggcttccactacggcatcgtgcaggcgccgttgggccccgacatctccggccccgagctcgtcgccgccgtggcgaacgccggcgccatcggcctcctccgcctccccgactggccggcgccggatcacgtcagagaactgatccggaagaccaggagcctcacgtccaagccgttcggggcggccatcgtgctggccttcccgcacgaggagaatctcagggtcgtcctggaggagaagctcgacgtgctgcaggtctactggggggacttccccaaccaccgggtccaagaggcgcatcgcgccggggttaaggtcttgcatcaggtcggcagccttgaggaggcagctaaagctaaagaagccggtgtagatgggatcattgttcagggacgtgaggcagggggtcatgtaattggtcaggaaggactgtttccactgttgccacgagtagtagatcttgtttcagactcgagcattccagttattgccgctggcggaattgtagatggacgtggctatgttgccgcattggcactcggtgcccaaggtgtttgtttaggaactaggtttgttgctaccgaggaaagctttgcacatcctattttataagcaaaagctaatcgagatgagtcacacagactacacaaatatattcggacgtgctagatggcctgatgctccacagcgggtcctggaaacacccttctatgatgagtggaagaataatttcccagaccaggaaacagaggaagatcaacccatcataggccactctatcatccatggtgtgcacaaggatattcgtcggtttgccggtactgttccaaacgcgacggcaacaggagatatcgacatcatggccatgtattcgggtcagggtgttgggctaatcacggaaatcataccagctgctcaagttgtcaaaagtctggtcgctgaagcgaaggaagtcatcagagaaaagctttctggttaccaatagaatccttcctgaactgcaaactagaagtatctgtgtgtgagtagtcaccaatcagaataatcggaagcaccaaggtttaggtttgattcttgtgctatttttaagtacaataaagtaaaaaatgatgaaaataaacgagactaacaaaggtattctgtcagacatttgtgtgcgtgtgtgcgcgctctgcatatctgtaatagttttggagtgtcttcacatagccctgaaggtcttcaaaagggtatttttggaggataggttgct

SEQ ID NO: 41456 - protein, 214 aa, Zea mays subsp. mays
  peptide (1)..(214): Ceres Seq. ID no. 12418695
  misc_feature (8)..(213): Pfam Name: Pfam Description:  2-nitropropane dioxygenase
  misc_feature (8)..(213): NCBI GI NO: 30697982 NR Description: 2-nitropropane dioxygenase-related protein
  misc_feature (52)..(213): NCBI GI NO: 30697978 NR Description: 2-nitropropane dioxygenase-related protein
  misc_feature (26)..(212): NCBI GI NO: 38505809 NR Description: 2-nitropropane dioxygenase
  misc_feature (10)..(212): NCBI GI NO: 20807921 NR Description: Dioxygenases related to 2-nitropropane dioxygenase
  misc_feature (10)..(212): NCBI GI NO: 16802856 NR Description: similar to oxidoreductases
  misc_feature (10)..(212): NCBI GI NO: 16799884 NR Description: similar to oxidoreductases [Listeria innocua]
  misc_feature (29)..(213): NCBI GI NO: 15643563 NR Description: conserved hypothetical protein
  misc_feature (10)..(214): NCBI GI NO: 27378254 NR Description: bll3143 [Bradyrhizobium japonicum]
  misc_feature (10)..(211): NCBI GI NO: 15896810 NR Description: Dioxygenase related to 2-nitropropane dioxygenase
  misc_feature (10)..(207): NCBI GI NO: 23111355 NR Description: hypothetical protein
MAMPSGWRGILGFHYGIVQAPLGPDISGPELVAAVANAGAIGLLRLPDWPAPDHVRELIRKTRSLTSKPFGAAIVLAFPHEENLRVVLEEKLDVLQVYWGDFPNHRVQEAHRAGVKVLHQVGSLEEAAKAKEAGVDGIIVQGREAGGHVIGQEGLFPLLPRVVDLVSDSSIPVIAAGGIVDGRGYVAALALGAQGVCLGTRFVATEESFAHPIL

SEQ ID NO: 41457 - protein, 212 aa, Zea mays subsp. mays
  peptide (1)..(212): Ceres Seq. ID no. 12418696
  misc_feature (6)..(211): Pfam Name: Pfam Description:  2-nitropropane dioxygenase
  misc_feature (6)..(211): NCBI GI NO: 30697982 NR Description: 2-nitropropane dioxygenase-related protein
  misc_feature (50)..(211): NCBI GI NO: 30697978 NR Description: 2-nitropropane dioxygenase-related protein
  misc_feature (24)..(210): NCBI GI NO: 38505809 NR Description: 2-nitropropane dioxygenase
  misc_feature (8)..(210): NCBI GI NO: 20807921 NR Description: Dioxygenases related to 2-nitropropane dioxygenase
  misc_feature (8)..(210): NCBI GI NO: 16802856 NR Description: similar to oxidoreductases
  misc_feature (8)..(210): NCBI GI NO: 16799884 NR Description: similar to oxidoreductases [Listeria innocua]
  misc_feature (27)..(211): NCBI GI NO: 15643563 NR Description: conserved hypothetical protein
  misc_feature (8)..(212): NCBI GI NO: 27378254 NR Description: bll3143 [Bradyrhizobium japonicum]
  misc_feature (8)..(209): NCBI GI NO: 15896810 NR Description: Dioxygenase related to 2-nitropropane dioxygenase
  misc_feature (8)..(205): NCBI GI NO: 23111355 NR Description: hypothetical protein
MPSGWRGILGFHYGIVQAPLGPDISGPELVAAVANAGAIGLLRLPDWPAPDHVRELIRKTRSLTSKPFGAAIVLAFPHEENLRVVLEEKLDVLQVYWGDFPNHRVQEAHRAGVKVLHQVGSLEEAAKAKEAGVDGIIVQGREAGGHVIGQEGLFPLLPRVVDLVSDSSIPVIAAGGIVDGRGYVAALALGAQGVCLGTRFVATEESFAHPIL

SEQ ID NO: 41458 - protein, 126 aa, Zea mays subsp. mays
  peptide (1)..(126): Ceres Seq. ID no. 12418697
MTPRVVDGPPQLPSRPFRSPHGEGSYSDLPPRRAPTAPRLLQTLSHPHLLPFSEGIKFASACVLCWRARWRCRPGGGVSWASTTASCRRRWAPTSPAPSSSPPWRTPAPSASSASPTGRRRITSEN

SEQ ID NO: 41459 - DNA, 1252 bp, Zea mays subsp. mays
  misc_feature (1)..(1252): Ceres Seq. ID no. 12364488
gcacgagaccattacctagaacatcctaatcgaaaaagcacagcagagcgccactcgactcgactcatcctttcggttcccctcccccctccgcgttccacaaccctcgagaagcttccaccctcccctcctgcgacgccgccagagccgcggaaaccctacccaccccggccgctcacgcaccgggcgcccgccgccgccggtcgcgtacctgccgccgacaccgcccaaagcgattggatctagagatcgtcagtagccacgatggaggactgggattctgaagaattccagccagttgtgcctgttgtgaaagccgagccacttaaaaatcagtgggctgatgaagatgttgaagaagatgatgtaaaagaatcatgggaagaagaggaggaggaggagaaacctaagccagcgccagtggaaaaggtcgctgcaaaacctagcactaaggctcctgctaaaaagggaaaacagcaagcattgacaagtgctgaagaaccagatgagcctcctcttagtcccacttcacagaaaattcgccaacaaagacttgtggaagaagctgacttcaagtctaccaccgagctttttgcaaagaagggcagtgagcaaaagtcactagatacttttattccaaagtccgagagtgactttgcggaatacgcggagcttattgcaaacaaactacgcccctatgagaaaagctttcactacatggctctgcttaagaatgtcatgagactttccatgacatcgttgaaaggtgcggacgccaaagatatatcttcttccgtgacggcaattgctaacgagaagatcaaggctgagaaggaggctgcagcaggcaaaaagaaacaaggagcgaaaaagaagcaactccacatcgagaaaggagacgacgacttcatccccggccggggtggtggctacgatgaccccgatgagtacgacttcatgtgatctggctgggagggatagtaggtttctgttatgtatacctttggcgggcagagaatatatcactagagtttgcggcatactattgcatggaacatgcgttatctattcgagaatgatttttgactctgcaggataagaagagcacttgtgatctggatgcatgggtgttttcttatttatccttgaatctttgggttatttttttttcaacattgcattttttgccaaatgtactatagtaccttgtactatctggttactccgtgagtcatgaaagcaattaaatccc

SEQ ID NO: 41460 - protein, 232 aa, Zea mays subsp. mays
  peptide (1)..(232): Ceres Seq. ID no. 12364489
  misc_feature (1)..(232): NCBI GI NO: 18408426 NR Description: expressed protein; protein id: At1g66070
  misc_feature (1)..(232): NCBI GI NO: 30693092 NR Description: expressed protein [Arabidopsis thaliana]
  misc_feature (1)..(232): NCBI GI NO: 32766433 NR Description: Unknown (protein for MGC:63801) [Danio rerio]
  misc_feature (2)..(232): NCBI GI NO: 4503511 NR Description: eukaryotic translation initiation factor 3
  misc_feature (2)..(232): NCBI GI NO: 10435304 NR Description: unnamed protein product [Homo sapiens]
  misc_feature (2)..(232): NCBI GI NO: 23503065 NR Description: Eukaryotic translation initiation factor 3 subunit1
  misc_feature (2)..(232): NCBI GI NO: 27374365 NR Description: Adam-PA [Drosophila willistoni]
  misc_feature (2)..(232): NCBI GI NO: 34856798 NR Description: similar to Eukaryotic translation initiation factor3 subunit 1
  misc_feature (2)..(232): NCBI GI NO: 19921950 NR Description: CG12131-PA [Drosophila melanogaster]
  misc_feature (2)..(232): NCBI GI NO: 27374242 NR Description: CG12131-PA [Drosophila erecta]
MEDWDSEEFQPVVPVVKAEPLKNQWADEDVEEDDVKESWEEEEEEEKPKPAPVEKVAAKPSTKAPAKKGKQQALTSAEEPDEPPLSPTSQKIRQQRLVEEADFKSTTELFAKKGSEQKSLDTFIPKSESDFAEYAELIANKLRPYEKSFHYMALLKNVMRLSMTSLKGADAKDISSSVTAIANEKIKAEKEAAAGKKKQGAKKKQLHIEKGDDDFIPGRGGGYDDPDEYDFM

SEQ ID NO: 41461 - DNA, 767 bp, Zea mays subsp. mays; identical to SEQ ID NO: 37166
  misc_feature (1)..(767): Ceres Seq. ID no. 13635648

SEQ ID NO: 41462 - protein, 255 aa, Zea mays subsp. mays; identical to SEQ ID NO: 37167
  peptide (1)..(255): Ceres Seq. ID no. 13635649
  misc_feature (131)..(254): Pfam Name: Pfam Description:  Dynamin central region
  misc_feature (2)..(254): NCBI GI NO: 18071348 NR Description: putative GTP-binding protein
  misc_feature (2)..(254): NCBI GI NO: 37536976 NR Description: putative phragmoplastin
  misc_feature (2)..(254): NCBI GI NO: 6651403 NR Description: dynamin-like protein 5 [Arabidopsis thaliana]
  misc_feature (2)..(254): NCBI GI NO: 19569772 NR Description: dynamin-like protein C [Arabidopsis thaliana]
  misc_feature (2)..(254): NCBI GI NO: 21537304 NR Description: dynamin, putative [Arabidopsis thaliana]
  misc_feature (2)..(254): NCBI GI NO: 15223914 NR Description: dynamin -related [Arabidopsis thaliana]
  misc_feature (2)..(254): NCBI GI NO: 11357275 NR Description: dynamin-like protein 4
  misc_feature (2)..(254): NCBI GI NO: 18411520 NR Description: dynamin-related protein 4 (ADL4)
  misc_feature (2)..(254): NCBI GI NO: 6651401 NR Description: dynamin-like protein 4 [Arabidopsis thaliana]
  misc_feature (4)..(254): NCBI GI NO: 7484944 NR Description: probable phragmoplastin At2g44590

SEQ ID NO: 41463 - protein, 182 aa, Zea mays subsp. mays; identical to SEQ ID NO: 37168
  peptide (1)..(182): Ceres Seq. ID no. 13635650
  misc_feature (58)..(181): Pfam Name: Pfam Description:  Dynamin central region
  misc_feature (1)..(181): NCBI GI NO: 18071348 NR Description: putative GTP-binding protein
  misc_feature (1)..(181): NCBI GI NO: 37536976 NR Description: putative phragmoplastin
  misc_feature (1)..(181): NCBI GI NO: 6651403 NR Description: dynamin-like protein 5 [Arabidopsis thaliana]
  misc_feature (1)..(181): NCBI GI NO: 19569772 NR Description: dynamin-like protein C [Arabidopsis thaliana]
  misc_feature (1)..(181): NCBI GI NO: 21537304 NR Description: dynamin, putative [Arabidopsis thaliana]
  misc_feature (1)..(181): NCBI GI NO: 15223914 NR Description: dynamin -related [Arabidopsis thaliana]
  misc_feature (1)..(181): NCBI GI NO: 11357275 NR Description: dynamin-like protein 4
  misc_feature (1)..(181): NCBI GI NO: 18411520 NR Description: dynamin-related protein 4 (ADL4)
  misc_feature (1)..(181): NCBI GI NO: 6651401 NR Description: dynamin-like protein 4 [Arabidopsis thaliana]
  misc_feature (1)..(181): NCBI GI NO: 7484944 NR Description: probable phragmoplastin At2g44590

SEQ ID NO: 41464 - protein, 131 aa, Zea mays subsp. mays; identical to SEQ ID NO: 37169
  peptide (1)..(131): Ceres Seq. ID no. 13635651
  misc_feature (7)..(130): Pfam Name: Pfam Description:  Dynamin central region
  misc_feature (1)..(130): NCBI GI NO: 18071348 NR Description: putative GTP-binding protein
  misc_feature (1)..(130): NCBI GI NO: 37536976 NR Description: putative phragmoplastin
  misc_feature (1)..(130): NCBI GI NO: 6651403 NR Description: dynamin-like protein 5 [Arabidopsis thaliana]
  misc_feature (1)..(130): NCBI GI NO: 21537304 NR Description: dynamin, putative [Arabidopsis thaliana]
  misc_feature (1)..(130): NCBI GI NO: 19569772 NR Description: dynamin-like protein C [Arabidopsis thaliana]
  misc_feature (1)..(130): NCBI GI NO: 15223914 NR Description: dynamin -related [Arabidopsis thaliana]
  misc_feature (1)..(130): NCBI GI NO: 11357275 NR Description: dynamin-like protein 4
  misc_feature (1)..(130): NCBI GI NO: 18411520 NR Description: dynamin-related protein 4 (ADL4)
  misc_feature (1)..(130): NCBI GI NO: 6651401 NR Description: dynamin-like protein 4 [Arabidopsis thaliana]
  misc_feature (1)..(130): NCBI GI NO: 7484944 NR Description: probable phragmoplastin At2g44590

SEQ ID NO: 41465 - DNA, 1063 bp, Zea mays subsp. mays
  misc_feature (1)..(1063): Ceres Seq. ID no. 12418691
gcacgagaccattacctagaacatcctaatcaaaaatcccgcatccggcacaaaccaactgcatcaagctccaccagagaagacaggcccgccgacggccgcagccgcgggcggactcgtgagtcgcgactacgccgctgcagttcccaactcagggtgcctgcccgtaacctacccaagagcggccccgccatgcgcgcggaggtcacccagatcagcgccctaaccgccgtggccgcgcacgtgctctgctctgcgggccttgctgccgcccacgccctcgctggccgcggcgcgctcgtctccgaccccgcgctcgcccttcgccttctcgtggtctgtgaagcgcccatagtcatcgcagtgttcagctacctccggcgtgatgctaaaagttgctcgtttttcagggctgttgcaagaggattgatcggcttgcccgtgggagcgttccttaatgcatttggagcaatcattcttggggcacctgttggagtcaagtactggatagctactatttactggtcgcttgtcatgtccctgtttacgtttgttcccgcagcatgtgtctttggagcatccaggatcgattggcaggatgtgctttctcactccatttatttcacgccaactgatgttgagaactacatgatctctgcaccttgccatggagctgtgctaggagcgtggctcggtgcttggcctatgccacttgactgggagagaccatggcaggaatggccaatctgtgtcacttatggtgcagttgctgggtatttgttcggaatggcagtgtcattggtcctaacagcactttacaaaagaagggttcgtgcaaaagctgactagccgttcttcccacaaagcaatgtatttgctgataacatttcttgttcctgcgagtactcatcactttcagtagccttttcacccaggttcacattgttgtattcttttgaagcccccctcattttttttgcagttgtacattgttttcttgaatgtaatgtgaaggactcagtttattactgtaaaacacacgtttgttgagagagtgcgtgtt

SEQ ID NO: 41466 - protein, 282 aa, Zea mays subsp. mays
  peptide (1)..(282): Ceres Seq. ID no. 12418692
  misc_feature (60)..(276): NCBI GI NO: 30684686 NR Description: expressed protein [Arabidopsis thaliana]
  misc_feature (60)..(270): NCBI GI NO: 25518421 NR Description: hypothetical protein T24D18
  misc_feature (108)..(266): NCBI GI NO: 6679315 NR Description: phosphatidylinositol glycan, class F
  misc_feature (108)..(266): NCBI GI NO: 22135636 NR Description: phosphatidylinositol glycan, class F
  misc_feature (158)..(266): NCBI GI NO: 4505797 NR Description: phosphatidylinositol glycan, class F isoform 1
  misc_feature (142)..(269): NCBI GI NO: 19075814 NR Description: putative short-chain dehydrogenase
  misc_feature (158)..(245): NCBI GI NO: 27894291 NR Description: phosphatidylinositol glycan, class F isoform 2
  misc_feature (143)..(268): NCBI GI NO: 40742646 NR Description: hypothetical protein AN7650.2
ARDHYLEHPNQKSRIRHKPTASSSTREDRPADGRSRGRTRESRLRRCSSQLRVPARNLPKSGPAMRAEVTQISALTAVAAHVLCSAGLAAAHALAGRGALVSDPALALRLLVVCEAPIVIAVFSYLRRDAKSCSFFRAVARGLIGLPVGAFLNAFGAIILGAPVGVKYWIATIYWSLVMSLFTFVPAACVFGASRIDWQDVLSHSIYFTPTDVENYMISAPCHGAVLGAWLGAWPMPLDWERPWQEWPICVTYGAVAGYLFGMAVSLVLTALYKRRVRAKAD

SEQ ID NO: 41467 - protein, 218 aa, Zea mays subsp. mays
  peptide (1)..(218): Ceres Seq. ID no. 12418693
  misc_feature (1)..(212): NCBI GI NO: 30684686 NR Description: expressed protein [Arabidopsis thaliana]
  misc_feature (1)..(206): NCBI GI NO: 25518421 NR Description: hypothetical protein T24D18
  misc_feature (44)..(202): NCBI GI NO: 6679315 NR Description: phosphatidylinositol glycan, class F
  misc_feature (44)..(202): NCBI GI NO: 22135636 NR Description: phosphatidylinositol glycan, class F
  misc_feature (94)..(202): NCBI GI NO: 4505797 NR Description: phosphatidylinositol glycan, class F isoform 1
  misc_feature (78)..(205): NCBI GI NO: 19075814 NR Description: putative short-chain dehydrogenase
  misc_feature (94)..(181): NCBI GI NO: 27894291 NR Description: phosphatidylinositol glycan, class F isoform 2
  misc_feature (79)..(204): NCBI GI NO: 40742646 NR Description: hypothetical protein AN7650.2
MRAEVTQISALTAVAAHVLCSAGLAAAHALAGRGALVSDPALALRLLVVCEAPIVIAVFSYLRRDAKSCSFFRAVARGLIGLPVGAFLNAFGAIILGAPVGVKYWIATIYWSLVMSLFTFVPAACVFGASRIDWQDVLSHSIYFTPTDVENYMISAPCHGAVLGAWLGAWPMPLDWERPWQEWPICVTYGAVAGYLFGMAVSLVLTALYKRRVRAKAD

SEQ ID NO: 41468 - DNA, 1980 bp, Zea mays subsp. mays
  misc_feature (1)..(1980): Ceres Seq. ID no. 12418235
gtcggtccaagagcacgacgagcagacgacgctgccggcccggccgtgctgctcctctgagtccgagatctgaaggcgcggcaggaaggaaacgggcgggcgagaggatccagcagccctcccccacgcgcgcgcgacggttagcgcgtcccagatctcggtgcggcgcctcccgcccggccctgccggcgagagcgcggcccgatgaggcggcggccgttcctggagcagcggcggccttcgttcaagcgccggtggcagcagcgcccgtggtgggtgcgcctcgcgctttccctccttctcgccctcgcatgcgtcctcctcctcgccgtcctcctcggctcccccgaccccggcgcctcgccgtccacctccgccgcgtcctccggatctgagaccacctcctcacctctcctccgtcagagaacttacctggagggaatcacggatgcgctcaacatgactgacgaaatgctgagcgcccgctcgttctcgaggcagctcatggaccagatttatctagccaaaacatatgtcgtcgttgccaaggaggccaacaacctcagtttgtggcggagcttagtgcccaggtacggcgggcgcagagcatccttgcgcatgctgcagcctatgggggcacggtgatggagcaggaagcagagaaggcgatcagggatatgtcggtgctgctcttccaggcgcagcagcttcggtacgtagcagtatcacaatcatgaagttgaaaggccagattcagtccctagaggagaagtcaaaagttgaggtggagaaaagcacaaaatatggccagattgctgctgaggagctcccaaagggactttattgccttggtatccggttaaccatggaatggttcaagagtcccgagcttcagaggaagttttcggataggagcccagcagtgcagagcaatctgagtgataacagcctctaccatttttgtgtcttctcagacaacatccttgctgtttcagttgttgttaattctacggctataaactcgaggcaccctgacaaggttgtttttcacttagtgactgatgagttgaactatgctccgatgaaggcatggtttggcatgaatgactacagaggggtcaccgtggagatacaaaaggtggaggactttacctggctcaatgcatcgtatgttcccgttcttaaacagctacagaatgctgctacacagaagttctacttctctggcagtggtagtcgtggaacaccaattaaattcaggaacccaaagtacttatcaatgcttaaccacttgaggttttatattccagaaatatatcctgaattgcagaaggtggtatttcttgatgatgatatcgttgttcagaaggacctatcagaattgtttactatcaacctcaatggcaatgtgatgggtgctgtagagacttgcatggagacattccacagatttcataagtatcttaaccattcccatccgctaatccgtgctcattttgaccctgatgcttgcggctgggcatttggtatgaacgtgcttgatctggttgaatggaggaacaagaatgtgacaggcatatatcattattggcaggagcgcaatgctgatcatactctatggaagcttgggtctttaccacctggacttcttgctttctatggcttggttgaagcattggatcccaaatggcatgtcttgggacttggctacacaaatgtggatcttgctactatcaaggaaggtgcagtactgcactacaatggaaatatgaagccatggctcaaaatcggaatggagaagtacaagagcttttgggataactatgtggactattcacaccctttgattcagcagtgcttcatgcgttgattgatgtgtatcaacattagaatttttgtaagcttcatggtagatatgttccgagcacatgctccaactgccacacggaaacattgtagttaaatcagttggcttttctc

SEQ ID NO: 41469 - protein, 378 aa, Zea mays subsp. mays
  peptide (1)..(378): Ceres Seq. ID no. 12418236
  misc_feature (1)..(376): NCBI GI NO: 32492171 NR Description: OSJNBb0034I13.1
  misc_feature (1)..(375): NCBI GI NO: 18399484 NR Description: Expressed protein; protein id: At2g20810
  misc_feature (1)..(358): NCBI GI NO: 25411994 NR Description: hypothetical protein At2g20810
  misc_feature (1)..(375): NCBI GI NO: 15293067 NR Description: unknown protein [Arabidopsis thaliana]
  misc_feature (2)..(375): NCBI GI NO: 15233046 NR Description: putative protein; protein id: At3g61130
  misc_feature (2)..(375): NCBI GI NO: 7271113 NR Description: 68 kDa protein [Cicer arietinum]
  misc_feature (1)..(375): NCBI GI NO: 10177914 NR Description: emb|CAB71043
  misc_feature (1)..(375): NCBI GI NO: 18422837 NR Description: putative protein; protein id: At5g47780
  misc_feature (1)..(375): NCBI GI NO: 38423965 NR Description: putative glycosyltransferase
  misc_feature (2)..(375): NCBI GI NO: 7485958 NR Description: hypothetical protein F22I13
MKLKGQIQSLEEKSKVEVEKSTKYGQIAAEELPKGLYCLGIRLTMEWFKSPELQRKFSDRSPAVQSNLSDNSLYHFCVFSDNILAVSVVVNSTAINSRHPDKVVFHLVTDELNYAPMKAWFGMNDYRGVTVEIQKVEDFTWLNASYVPVLKQLQNAATQKFYFSGSGSRGTPIKFRNPKYLSMLNHLRFYIPEIYPELQKVVFLDDDIVVQKDLSELFTINLNGNVMGAVETCMETFHRFHKYLNHSHPLIRAHFDPDACGWAFGMNVLDLVEWRNKNVTGIYHYWQERNADHTLWKLGSLPPGLLAFYGLVEALDPKWHVLGLGYTNVDLATIKEGAVLHYNGNMKPWLKIGMEKYKSFWDNYVDYSHPLIQQCFMR

SEQ ID NO: 41470 - protein, 334 aa, Zea mays subsp. mays
  peptide (1)..(334): Ceres Seq. ID no. 12418237
  misc_feature (1)..(332): NCBI GI NO: 32492171 NR Description: OSJNBb0034I13.1
  misc_feature (1)..(331): NCBI GI NO: 18399484 NR Description: Expressed protein; protein id: At2g20810
  misc_feature (1)..(314): NCBI GI NO: 25411994 NR Description: hypothetical protein At2g20810
  misc_feature (1)..(331): NCBI GI NO: 15293067 NR Description: unknown protein [Arabidopsis thaliana]
  misc_feature (1)..(331): NCBI GI NO: 15233046 NR Description: putative protein; protein id: At3g61130
  misc_feature (1)..(331): NCBI GI NO: 7271113 NR Description: 68 kDa protein [Cicer arietinum]
  misc_feature (1)..(331): NCBI GI NO: 10177914 NR Description: emb|CAB71043
  misc_feature (1)..(331): NCBI GI NO: 18422837 NR Description: putative protein; protein id: At5g47780
  misc_feature (1)..(331): NCBI GI NO: 38423965 NR Description: putative glycosyltransferase
  misc_feature (1)..(331): NCBI GI NO: 7485958 NR Description: hypothetical protein F22I13
MEWFKSPELQRKFSDRSPAVQSNLSDNSLYHFCVFSDNILAVSVVVNSTAINSRHPDKVVFHLVTDELNYAPMKAWFGMNDYRGVTVEIQKVEDFTWLNASYVPVLKQLQNAATQKFYFSGSGSRGTPIKFRNPKYLSMLNHLRFYIPEIYPELQKVVFLDDDIVVQKDLSELFTINLNGNVMGAVETCMETFHRFHKYLNHSHPLIRAHFDPDACGWAFGMNVLDLVEWRNKNVTGIYHYWQERNADHTLWKLGSLPPGLLAFYGLVEALDPKWHVLGLGYTNVDLATIKEGAVLHYNGNMKPWLKIGMEKYKSFWDNYVDYSHPLIQQCFMR

SEQ ID NO: 41471 - protein, 262 aa, Zea mays subsp. mays
  peptide (1)..(262): Ceres Seq. ID no. 12418238
  misc_feature (1)..(260): NCBI GI NO: 32492171 NR Description: OSJNBb0034I13.1
  misc_feature (1)..(259): NCBI GI NO: 18399484 NR Description: Expressed protein; protein id: At2g20810
  misc_feature (1)..(242): NCBI GI NO: 25411994 NR Description: hypothetical protein At2g20810
  misc_feature (1)..(259): NCBI GI NO: 15293067 NR Description: unknown protein [Arabidopsis thaliana]
  misc_feature (1)..(259): NCBI GI NO: 15233046 NR Description: putative protein; protein id: At3g61130
  misc_feature (1)..(259): NCBI GI NO: 7271113 NR Description: 68 kDa protein [Cicer arietinum]
  misc_feature (1)..(259): NCBI GI NO: 10177914 NR Description: emb|CAB71043
  misc_feature (1)..(259): NCBI GI NO: 18422837 NR Description: putative protein; protein id: At5g47780
  misc_feature (1)..(259): NCBI GI NO: 38423965 NR Description: putative glycosyltransferase
  misc_feature (1)..(259): NCBI GI NO: 7485958 NR Description: hypothetical protein F22I13
MKAWFGMNDYRGVTVEIQKVEDFTWLNASYVPVLKQLQNAATQKFYFSGSGSRGTPIKFRNPKYLSMLNHLRFYIPEIYPELQKVVFLDDDIVVQKDLSELFTINLNGNVMGAVETCMETFHRFHKYLNHSHPLIRAHFDPDACGWAFGMNVLDLVEWRNKNVTGIYHYWQERNADHTLWKLGSLPPGLLAFYGLVEALDPKWHVLGLGYTNVDLATIKEGAVLHYNGNMKPWLKIGMEKYKSFWDNYVDYSHPLIQQCFMR

SEQ ID NO: 41472 - DNA, 1767 bp, Zea mays subsp. mays
  misc_feature (1)..(1767): Ceres Seq. ID no. 12454825
cccccgtcgactcgcccgctccatcgcccccacgcacccgctgccggccaaaagccaattcgaatctccccgctgcgcggcggggcctctgcttccgcaatgcgggcctccgtcgaggaggcgggcgcgctcctggcgcggagcgactcagccggccgccgccgccgctccccgccgccggtgcagaccgcgtccccgaggcccggtagcctcaggcgccagtcgtcgtcgttccgcgaggacgtcgggcacgccgcctccgagacttacctcgtctcgcgcctcaccttcaccctcctccagtacctcgggttaggttaccgatggatgtcacaacttctttcactcacaatctatgcaattgtacttatgccaggatttatacaagttggatattactatttcttttcgagccaagtgcgtagaagtgtagtctatggagaccaacccagaaacaggttggatctatacataccagaagataatagtaggccctgtccagtggtggcctttgtgactggtggagcatggattattggttacaaggcatggggtgctcttctaggacgacgattggcagagcgaggaataatagttgcttgcattgattacagaaatttcccacaaggtacaataggggacatggttcatgatgcttctcaggggatttcttttgtgtgcaacaacatcgccagccatggaggagatcctaatcagatctacttgataggtcagtcagcaggtgcacatattgcagcgtgtgccctcatggagcaagcagtaaaagaatctggtgggaatcctgtttcttggagtcttacccaaatcaaagcatacttcggtttatctggagggtattaaattggatatctaatgaagtggtatctagtaacgattagatataacagtaaggattaatgatggatttgaagtacaatttcagcataatggaaggagaggaatcattgtcacgttattctcctgaaattgttgcaaagacgtcaagtgctgaaaccatagctcttctgcctcttgttgttcttatgcatggaactgaagattattcaataccatcatcttccagtcaaacttttgttgacgtcctccaacaagctggtgctcaagcaaggttactattgtacgaagggaaaacacatacagatatctttgtacaggaccctctaaggggtggaagagatccattggttgaagacgtgttgtctattattcatgctgatgatgcaaatgcatgtcaaaagattgctttagcaccaactcctaggagattagttttcgagtggcaattaaagttggcacgcaaaattagtccattctagcagtatgaaccatggagaagcttggagctatggattttgcaccttcatgaggaaagggtgctcgtctgctcggggagccgttgagctggattggatcaggcaagtaaaaggttctcgcgtcttctttacttgcacaacgttggtcaatgtgaaacttgtagctggtacgcaatacgagaggaagaagctaaatacacgactgggaatggaaaccacgtcatcttttttttgcaaggctgtatataatgttgcatattatattgtacaaaggcttgtactacgtttcttgtgcctctattctaaaatgtaagttttttttttaattttagccgaaatcaaactgactaaaggcttgtttcaaactgactaaaggcttgtttggaagcactcagtttttaagaaattagtttataaaaattgagttggttcc

SEQ ID NO: 41473 - protein, 286 aa, Zea mays subsp. mays
  peptide (1)..(286): Ceres Seq. ID no. 12454826
  misc_feature (11)..(286): NCBI GI NO: 22326830 NR Description: Carboxylesterase-like protein
  misc_feature (63)..(286): NCBI GI NO: 22329792 NR Description: hypothetical protein; protein id: At1g26120
  misc_feature (63)..(286): NCBI GI NO: 25518434 NR Description: hypothetical protein F28B23.20
  misc_feature (178)..(286): NCBI GI NO: 11357218 NR Description: Carboxylesterase-like protein
  misc_feature (11)..(105): NCBI GI NO: 11357218 NR Description: Carboxylesterase-like protein
  misc_feature (152)..(181): NCBI GI NO: 11357218 NR Description: Carboxylesterase-like protein
  misc_feature (154)..(286): NCBI GI NO: 15232904 NR Description: hypothetical protein; protein id: At3g02410.1
  misc_feature (19)..(105): NCBI GI NO: 15232904 NR Description: hypothetical protein; protein id: At3g02410.1
  misc_feature (144)..(286): NCBI GI NO: 28871958 NR Description: esterase/lipase/thioesterase family protein
  misc_feature (143)..(286): NCBI GI NO: 23470769 NR Description: hypothetical protein
PPSTRPLHRPHAPAAGQKPIRISPLRGGASASAMRASVEEAGALLARSDSAGRRRRSPPPVQTASPRPGSLRRQSSSFREDVGHAASETYLVSRLTFTLLQYLGLGYRWMSQLLSLTIYAIVLMPGFIQVGYYYFFSSQVRRSVVYGDQPRNRLDLYIPEDNSRPCPVVAFVTGGAWIIGYKAWGALLGRRLAERGIIVACIDYRNFPQGTIGDMVHDASQGISFVCNNIASHGGDPNQIYLIGQSAGAHIAACALMEQAVKESGGNPVSWSLTQIKAYFGLSGGY

SEQ ID NO: 41474 - protein, 253 aa, Zea mays subsp. mays
  peptide (1)..(253): Ceres Seq. ID no. 12454827
  misc_feature (1)..(253): NCBI GI NO: 22326830 NR Description: Carboxylesterase-like protein
  misc_feature (30)..(253): NCBI GI NO: 22329792 NR Description: hypothetical protein; protein id: At1g26120
  misc_feature (30)..(253): NCBI GI NO: 25518434 NR Description: hypothetical protein F28B23.20
  misc_feature (145)..(253): NCBI GI NO: 11357218 NR Description: Carboxylesterase-like protein
  misc_feature (1)..(72): NCBI GI NO: 11357218 NR Description: Carboxylesterase-like protein
  misc_feature (119)..(148): NCBI GI NO: 11357218 NR Description: Carboxylesterase-like protein
  misc_feature (121)..(253): NCBI GI NO: 15232904 NR Description: hypothetical protein; protein id: At3g02410.1
  misc_feature (1)..(72): NCBI GI NO: 15232904 NR Description: hypothetical protein; protein id: At3g02410.1
  misc_feature (111)..(253): NCBI GI NO: 28871958 NR Description: esterase/lipase/thioesterase family protein
  misc_feature (110)..(253): NCBI GI NO: 23470769 NR Description: hypothetical protein
MRASVEEAGALLARSDSAGRRRRSPPPVQTASPRPGSLRRQSSSFREDVGHAASETYLVSRLTFTLLQYLGLGYRWMSQLLSLTIYAIVLMPGFIQVGYYYFFSSQVRRSVVYGDQPRNRLDLYIPEDNSRPCPVVAFVTGGAWIIGYKAWGALLGRRLAERGIIVACIDYRNFPQGTIGDMVHDASQGISFVCNNIASHGGDPNQIYLIGQSAGAHIAACALMEQAVKESGGNPVSWSLTQIKAYFGLSGGY

SEQ ID NO: 41475 - protein, 177 aa, Zea mays subsp. mays
  peptide (1)..(177): Ceres Seq. ID no. 12454828
  misc_feature (1)..(177): NCBI GI NO: 22326830 NR Description: Carboxylesterase-like protein
  misc_feature (1)..(177): NCBI GI NO: 22329792 NR Description: hypothetical protein; protein id: At1g26120
  misc_feature (1)..(177): NCBI GI NO: 25518434 NR Description: hypothetical protein F28B23.20
  misc_feature (69)..(177): NCBI GI NO: 11357218 NR Description: Carboxylesterase-like protein
  misc_feature (43)..(72): NCBI GI NO: 11357218 NR Description: Carboxylesterase-like protein
  misc_feature (45)..(177): NCBI GI NO: 15232904 NR Description: hypothetical protein; protein id: At3g02410.1
  misc_feature (35)..(177): NCBI GI NO: 28871958 NR Description: esterase/lipase/thioesterase family protein
  misc_feature (34)..(177): NCBI GI NO: 23470769 NR Description: hypothetical protein
  misc_feature (37)..(177): NCBI GI NO: 16126537 NR Description: carboxylesterase family protein
  misc_feature (34)..(156): NCBI GI NO: 22981708 NR Description: hypothetical protein [Ralstonia metallidurans]
MSQLLSLTIYAIVLMPGFIQVGYYYFFSSQVRRSVVYGDQPRNRLDLYIPEDNSRPCPVVAFVTGGAWIIGYKAWGALLGRRLAERGIIVACIDYRNFPQGTIGDMVHDASQGISFVCNNIASHGGDPNQIYLIGQSAGAHIAACALMEQAVKESGGNPVSWSLTQIKAYFGLSGGY

SEQ ID NO: 41476 - DNA, 1858 bp, Zea mays subsp. mays
  misc_feature (1)..(1858): Ceres Seq. ID no. 12376724
attggaatctctgggcgactcgacctgaacaaccccgcccgccgtcctgcccttgtgctctagtcctcccgcgaccgttccaaattcttcctcgcgttcgtattccacgcggcgacgtcgccatcgccatcgcggccgccgctccgcccctcttccttcgcatatacgtaggtaggcgcctccccaaaccctaagcctttatctcccacgcgcgcggctcgctctgctgcgccgcggctcgctcgaccccgcagatcgccggcgatgggatccaaggaccaggacggaggggctgcatcctcgggaggcggcttcttctcgtcgttcgccgccggcatgcgcagctggggcaccgccgtgcataaatccgtcaacgggctgcttggttatgaaggccttgaagttattaaccccgatggaggcacagatgatgctgaagaagaagctttgaaggggagatggaagcaggaggaccgtgatagctactggaagatgatgcacaaatacataggatcagatgttacatcacttgtgacacttccagtcataatttttgagccaatgacaatgcttcagaaaatggccgagttgatggaatactgtgaattgttagacaaagcagatgaatgtgaggatccatacatgtgtatggtttatgcttctacatgggctgtttctgtgtactttgcatatcaacgcacatggaagccttttaatccgatccttggagagacttatgagatggttaaccaccagggcattacatttcttgctgagcaggtaagccatcatcccccaatgggtgttgctcactgcgagaatgaacattttacttacgatatcacgtctaagttgaagaccaagtttttgggaaattcagtggaaatttacccagttggaaggactcgagtgacactaaaaaaatctggtgtcgtgttggatttggtgccaccactaacaaaggttaacaacctgatatttgggcgcacttgggttgattctcctggagagatggtcatgacgaacctgacaactggagacaaagttgtgctatatttccagccatgcggctggtttggggctggccgttacgaggtggatgggtatgtgtacagtgcagcggaagaacccaaaatcatgattacagggaagtggaacaagtccctgagttgccaaccatgtgaccaagaaggcgatcctcttccaggcacggagctgaaggagatctggagagttgctcctgccccacagggcgacaagtatcagtacacacacttcgcacacaaaataaacagcttcgacacggcacctaagaagctgttggcatctgattcacggctgaggcctgatagatatgccctcgagaagggtgacatgtctaagtccggggcagagaagagcaggctcgaggaacaacagagagctgagaaacgaactcgagaggccaagggcgagcaatttactcctagatggttcaacctgacagatgtggtctcccctacaccgtggggtgacctggaaatttatgaatacaacggcaaatacacagagcaccgggctgccatagaccgctccgatgtcaccgacgagacagatgtcacttcagtcaagttcagcccatggcaatatggtagctcatcttcccaatgattctccgtggccagaagccgccatgcctacgcgcattgtgtaaaacacttccaggcctggctttgctggtttgttgtgccatcagcggtttccttgcccttgtagtattgtggccttcccccttttttcccttaaatgctacagttattcaggaagtggtgtagtccgtgtactgtcgcaagtctagcagagattgcagagttttgtt

SEQ ID NO: 41477 - protein, 461 aa, Zea mays subsp. mays
  peptide (1)..(461): Ceres Seq. ID no. 12376725
  misc_feature (29)..(432): Pfam Name: Pfam Description:  Oxysterol-binding protein
  misc_feature (16)..(461): NCBI GI NO: 15238398 NR Description: oxysterol-binding protein - like
  misc_feature (13)..(460): NCBI GI NO: 15241681 NR Description: putative protein; protein id: At5g02100
  misc_feature (1)..(460): NCBI GI NO: 15232633 NR Description: putative oxysterol-binding protein
  misc_feature (16)..(461): NCBI GI NO: 8885548 NR Description: oxysterol-binding protein [Arabidopsis thaliana]
  misc_feature (3)..(458): NCBI GI NO: 38639323 NR Description: oxysterol-binding protein [Solanum tuberosum]
  misc_feature (82)..(300): NCBI GI NO: 38639321 NR Description: putative oxysterol-binding protein
  misc_feature (73)..(309): NCBI GI NO: 27469640 NR Description: Similar to oxysterol binding protein-like 2
  misc_feature (313)..(439): NCBI GI NO: 27469640 NR Description: Similar to oxysterol binding protein-like 2
  misc_feature (73)..(305): NCBI GI NO: 17529997 NR Description: oxysterol-binding protein-like protein OSBPL1A
  misc_feature (313)..(427): NCBI GI NO: 17529997 NR Description: oxysterol-binding protein-like protein OSBPL1A
MGSKDQDGGAASSGGGFFSSFAAGMRSWGTAVHKSVNGLLGYEGLEVINPDGGTDDAEEEALKGRWKQEDRDSYWKMMHKYIGSDVTSLVTLPVIIFEPMTMLQKMAELMEYCELLDKADECEDPYMCMVYASTWAVSVYFAYQRTWKPFNPILGETYEMVNHQGITFLAEQVSHHPPMGVAHCENEHFTYDITSKLKTKFLGNSVEIYPVGRTRVTLKKSGVVLDLVPPLTKVNNLIFGRTWVDSPGEMVMTNLTTGDKVVLYFQPCGWFGAGRYEVDGYVYSAAEEPKIMITGKWNKSLSCQPCDQEGDPLPGTELKEIWRVAPAPQGDKYQYTHFAHKINSFDTAPKKLLASDSRLRPDRYALEKGDMSKSGAEKSRLEEQQRAEKRTREAKGEQFTPRWFNLTDVVSPTPWGDLEIYEYNGKYTEHRAAIDRSDVTDETDVTSVKFSPWQYGSSSSQ

SEQ ID NO: 41478 - protein, 437 aa, Zea mays subsp. mays
  peptide (1)..(437): Ceres Seq. ID no. 12376726
  misc_feature (5)..(408): Pfam Name: Pfam Description:  Oxysterol-binding protein
  misc_feature (1)..(437): NCBI GI NO: 15238398 NR Description: oxysterol-binding protein - like
  misc_feature (1)..(436): NCBI GI NO: 15241681 NR Description: putative protein; protein id: At5g02100
  misc_feature (1)..(436): NCBI GI NO: 15232633 NR Description: putative oxysterol-binding protein
  misc_feature (1)..(437): NCBI GI NO: 8885548 NR Description: oxysterol-binding protein [Arabidopsis thaliana]
  misc_feature (1)..(434): NCBI GI NO: 38639323 NR Description: oxysterol-binding protein [Solanum tuberosum]
  misc_feature (58)..(276): NCBI GI NO: 38639321 NR Description: putative oxysterol-binding protein
  misc_feature (49)..(285): NCBI GI NO: 27469640 NR Description: Similar to oxysterol binding protein-like 2
  misc_feature (289)..(415): NCBI GI NO: 27469640 NR Description: Similar to oxysterol binding protein-like 2
  misc_feature (49)..(281): NCBI GI NO: 17529997 NR Description: oxysterol-binding protein-like protein OSBPL1A
  misc_feature (289)..(403): NCBI GI NO: 17529997 NR Description: oxysterol-binding protein-like protein OSBPL1A
MRSWGTAVHKSVNGLLGYEGLEVINPDGGTDDAEEEALKGRWKQEDRDSYWKMMHKYIGSDVTSLVTLPVIIFEPMTMLQKMAELMEYCELLDKADECEDPYMCMVYASTWAVSVYFAYQRTWKPFNPILGETYEMVNHQGITFLAEQVSHHPPMGVAHCENEHFTYDITSKLKTKFLGNSVEIYPVGRTRVTLKKSGVVLDLVPPLTKVNNLIFGRTWVDSPGEMVMTNLTTGDKVVLYFQPCGWFGAGRYEVDGYVYSAAEEPKIMITGKWNKSLSCQPCDQEGDPLPGTELKEIWRVAPAPQGDKYQYTHFAHKINSFDTAPKKLLASDSRLRPDRYALEKGDMSKSGAEKSRLEEQQRAEKRTREAKGEQFTPRWFNLTDVVSPTPWGDLEIYEYNGKYTEHRAAIDRSDVTDETDVTSVKFSPWQYGSSSSQ

SEQ ID NO: 41479 - protein, 385 aa, Zea mays subsp. mays
  peptide (1)..(385): Ceres Seq. ID no. 12376727
  misc_feature (1)..(356): Pfam Name: Pfam Description:  Oxysterol-binding protein
  misc_feature (1)..(385): NCBI GI NO: 15238398 NR Description: oxysterol-binding protein - like
  misc_feature (1)..(384): NCBI GI NO: 15241681 NR Description: putative protein; protein id: At5g02100
  misc_feature (1)..(384): NCBI GI NO: 15232633 NR Description: putative oxysterol-binding protein
  misc_feature (1)..(385): NCBI GI NO: 8885548 NR Description: oxysterol-binding protein [Arabidopsis thaliana]
  misc_feature (1)..(382): NCBI GI NO: 38639323 NR Description: oxysterol-binding protein [Solanum tuberosum]
  misc_feature (6)..(224): NCBI GI NO: 38639321 NR Description: putative oxysterol-binding protein
  misc_feature (1)..(233): NCBI GI NO: 27469640 NR Description: Similar to oxysterol binding protein-like 2
  misc_feature (237)..(363): NCBI GI NO: 27469640 NR Description: Similar to oxysterol binding protein-like 2
  misc_feature (1)..(229): NCBI GI NO: 17529997 NR Description: oxysterol-binding protein-like protein OSBPL1A
  misc_feature (237)..(351): NCBI GI NO: 17529997 NR Description: oxysterol-binding protein-like protein OSBPL1A
MMHKYIGSDVTSLVTLPVIIFEPMTMLQKMAELMEYCELLDKADECEDPYMCMVYASTWAVSVYFAYQRTWKPFNPILGETYEMVNHQGITFLAEQVSHHPPMGVAHCENEHFTYDITSKLKTKFLGNSVEIYPVGRTRVTLKKSGVVLDLVPPLTKVNNLIFGRTWVDSPGEMVMTNLTTGDKVVLYFQPCGWFGAGRYEVDGYVYSAAEEPKIMITGKWNKSLSCQPCDQEGDPLPGTELKEIWRVAPAPQGDKYQYTHFAHKINSFDTAPKKLLASDSRLRPDRYALEKGDMSKSGAEKSRLEEQQRAEKRTREAKGEQFTPRWFNLTDVVSPTPWGDLEIYEYNGKYTEHRAAIDRSDVTDETDVTSVKFSPWQYGSSSSQ

SEQ ID NO: 41480 - DNA, 1296 bp, Zea mays subsp. mays
  misc_feature (1)..(1296): Ceres Seq. ID no. 12364476
gcacgagaccattacctagaacatcctaatcgaaaaatccaattgaggaagagaagaggcgataagcacactaatggctgacgagtcatggagggtgccaaccccagtgcaagaactggccgcaggcgtggtggagccaccgacccagttcgtgctgcaggagcaggatcgtcctggatctgggaccctgctcttcgccactgacatgccggagcccattcccgtcgttgacctcagcaggctggcggctgccgacgaggcttccaagctccggtcagcactggagacctgggggctcttcctggttactaagcatgggatagaagcatctctcatggacgatgtgatggccgcgtcacgcgattttttctaccagccgctcgaagcgaagcaggaatacagtaacctgataggcggcaagcggttccagatggagggttatggtaatgacatggtgaaatccaaagatcagatactggactggcaagatcggctgcagctcagggtggaaccccaagatgagaggaacctcgcttattggcccaaacaccctgattctttcagggatcttctggagaagtatgcatcaaaaaccaagatagttaggaacaaagtcttacgggcgatgggcaaaacattggagcttggcgaagactatttcatcagccagattggtgacagggcctcagcaattgctaggttcaactactaccctccctgtccaaggcctgatcttgtctttggcattaagcctcactctgacggtggcgcggtgacgatacttctcgtcgacaaggatgttgggggcctgcaagttcagaaagatggcgtttggtacactgttccgtccatgcctcacacgctgcttgtcaacttgggtgactccatggagataatgaacaatgggatcttcaaaagtccggtgcacagggttgtgacgaatgcagagaaagagagactctcactcgccatgttctacggcgtggaaggccagagagtgcttgagccagcgcttggtttgctgggtgaggagcgaccagcacggtacaggaaaattatggcctcagactacattattgggctccgtcaaggaattgcggaaggacagagatttatcgagactttgaagatatagtcaatcgtgaatgctcaagaataataaagagttgcttcgcccattgctaaatcagatcagagtccaatgtccattctgtaatgcattaccacattgttatacatgctcggaagacttcagagaagatgtaatcctgctcgttttactaaatttggggcatt

SEQ ID NO: 41481 - protein, 353 aa, Zea mays subsp. mays
  peptide (1)..(353): Ceres Seq. ID no. 12364477
  misc_feature (204)..(304): Pfam Name: II Pfam Description: 2OG-Fe
  misc_feature (1)..(353): NCBI GI NO: 24413982 NR Description: ethylene-forming-enzyme-like dioxygenase-like
  misc_feature (12)..(353): NCBI GI NO: 33115140 NR Description: iron/ascorbate-dependent oxidoreductase
  misc_feature (1)..(327): NCBI GI NO: 34898470 NR Description: ESTs D47168
  misc_feature (1)..(353): NCBI GI NO: 24413984 NR Description: ethylene-forming-enzyme-like dioxygenase-like
  misc_feature (12)..(353): NCBI GI NO: 34898468 NR Description: Similar to Prunus armeniaca ethylene-forming-enzyme-like dioxygenase
  misc_feature (12)..(253): NCBI GI NO: 24413981 NR Description: contains EST C72504
  misc_feature (274)..(353): NCBI GI NO: 24413981 NR Description: contains EST C72504
  misc_feature (1)..(353): NCBI GI NO: 34898472 NR Description: Similar to Prunus armeniaca ethylene-forming-enzyme-like dioxygenase
  misc_feature (165)..(353): NCBI GI NO: 24413983 NR Description: ethylene-forming-enzyme-like dioxygenase-like
  misc_feature (1)..(122): NCBI GI NO: 24413983 NR Description: ethylene-forming-enzyme-like dioxygenase-like
MADESWRVPTPVQELAAGVVEPPTQFVLQEQDRPGSGTLLFATDMPEPIPVVDLSRLAAADEASKLRSALETWGLFLVTKHGIEASLMDDVMAASRDFFYQPLEAKQEYSNLIGGKRFQMEGYGNDMVKSKDQILDWQDRLQLRVEPQDERNLAYWPKHPDSFRDLLEKYASKTKIVRNKVLRAMGKTLELGEDYFISQIGDRASAIARFNYYPPCPRPDLVFGIKPHSDGGAVTILLVDKDVGGLQVQKDGVWYTVPSMPHTLLVNLGDSMEIMNNGIFKSPVHRVVTNAEKERLSLAMFYGVEGQRVLEPALGLLGEERPARYRKIMASDYIIGLRQGIAEGQRFIETLKI

SEQ ID NO: 41482 - protein, 309 aa, Zea mays subsp. mays
  peptide (1)..(309): Ceres Seq. ID no. 12364478
  misc_feature (160)..(260): Pfam Name: II Pfam Description: 2OG-Fe
  misc_feature (1)..(309): NCBI GI NO: 24413982 NR Description: ethylene-forming-enzyme-like dioxygenase-like
  misc_feature (1)..(309): NCBI GI NO: 33115140 NR Description: iron/ascorbate-dependent oxidoreductase
  misc_feature (1)..(283): NCBI GI NO: 34898470 NR Description: ESTs D47168
  misc_feature (1)..(309): NCBI GI NO: 24413984 NR Description: ethylene-forming-enzyme-like dioxygenase-like
  misc_feature (1)..(309): NCBI GI NO: 34898468 NR Description: Similar to Prunus armeniaca ethylene-forming-enzyme-like dioxygenase
  misc_feature (1)..(209): NCBI GI NO: 24413981 NR Description: contains EST C72504
  misc_feature (230)..(309): NCBI GI NO: 24413981 NR Description: contains EST C72504
  misc_feature (1)..(309): NCBI GI NO: 34898472 NR Description: Similar to Prunus armeniaca ethylene-forming-enzyme-like dioxygenase
  misc_feature (121)..(309): NCBI GI NO: 24413983 NR Description: ethylene-forming-enzyme-like dioxygenase-like
  misc_feature (1)..(78): NCBI GI NO: 24413983 NR Description: ethylene-forming-enzyme-like dioxygenase-like
MPEPIPVVDLSRLAAADEASKLRSALETWGLFLVTKHGIEASLMDDVMAASRDFFYQPLEAKQEYSNLIGGKRFQMEGYGNDMVKSKDQILDWQDRLQLRVEPQDERNLAYWPKHPDSFRDLLEKYASKTKIVRNKVLRAMGKTLELGEDYFISQIGDRASAIARFNYYPPCPRPDLVFGIKPHSDGGAVTILLVDKDVGGLQVQKDGVWYTVPSMPHTLLVNLGDSMEIMNNGIFKSPVHRVVTNAEKERLSLAMFYGVEGQRVLEPALGLLGEERPARYRKIMASDYIIGLRQGIAEGQRFIETLKI

SEQ ID NO: 41483 - protein, 266 aa, Zea mays subsp. mays
  peptide (1)..(266): Ceres Seq. ID no. 12364479
  misc_feature (117)..(217): Pfam Name: II Pfam Description: 2OG-Fe
  misc_feature (1)..(266): NCBI GI NO: 24413982 NR Description: ethylene-forming-enzyme-like dioxygenase-like
  misc_feature (1)..(266): NCBI GI NO: 33115140 NR Description: iron/ascorbate-dependent oxidoreductase
  misc_feature (1)..(240): NCBI GI NO: 34898470 NR Description: ESTs D47168
  misc_feature (1)..(266): NCBI GI NO: 24413984 NR Description: ethylene-forming-enzyme-like dioxygenase-like
  misc_feature (1)..(266): NCBI GI NO: 34898468 NR Description: Similar to Prunus armeniaca ethylene-forming-enzyme-like dioxygenase
  misc_feature (1)..(166): NCBI GI NO: 24413981 NR Description: contains EST C72504
  misc_feature (187)..(266): NCBI GI NO: 24413981 NR Description: contains EST C72504
  misc_feature (1)..(266): NCBI GI NO: 34898472 NR Description: Similar to Prunus armeniaca ethylene-forming-enzyme-like dioxygenase
  misc_feature (78)..(266): NCBI GI NO: 24413983 NR Description: ethylene-forming-enzyme-like dioxygenase-like
  misc_feature (1)..(35): NCBI GI NO: 24413983 NR Description: ethylene-forming-enzyme-like dioxygenase-like
MDDVMAASRDFFYQPLEAKQEYSNLIGGKRFQMEGYGNDMVKSKDQILDWQDRLQLRVEPQDERNLAYWPKHPDSFRDLLEKYASKTKIVRNKVLRAMGKTLELGEDYFISQIGDRASAIARFNYYPPCPRPDLVFGIKPHSDGGAVTILLVDKDVGGLQVQKDGVWYTVPSMPHTLLVNLGDSMEIMNNGIFKSPVHRVVTNAEKERLSLAMFYGVEGQRVLEPALGLLGEERPARYRKIMASDYIIGLRQGIAEGQRFIETLKI

SEQ ID NO: 41484 - DNA, 1287 bp, Zea mays subsp. mays
  misc_feature (1)..(1287): Ceres Seq. ID no. 12454845
actttctcttcagttcaacttccgactttccgagtcgtcacctcacctaccggctaccgaggaagcagaagcgcacgagcgagacgcagccaccgcccgggaggaggaggaagccaagagcaatcggactttgaatggctcgcgacggcggcagcagagggtcaccgggggcggagcggcggcgggtggcgctgcgtgccctcctcgcgtcgggtggcgcggaggcggaggccgcgaggacgtcgagcaagggcctgctacgcggccttcggtgcacgtccgcggccgcatcgcaggctatcgcgccggagatcccgcggcctccggcggactggcgcggactcggttgcgccgcggcggcccaggcgcacgcgccggctgccgcggtggaagcggcccggcccacggcggactggcgcaggcttgggtgcgcggctggagcggcaccggcggtccaggctcaagcgccccggcgttccgaggagtggcgcgtgaggcggcggaggaacgagagggagaggcggaaggcgagggctggcggcgtcagtggtggtggtggggccagtgccgggatgggcgtcggcggggacgtctggtgcacgccgggcataccgttcgccgccgaggcctcttcggtggactgcgtggtggcgccgcaccatacggtggccgcgcgccgccgcgccgaggccgacaggccgcggagagagatgatgttccagacaaggatgttattgggaagaatgggtatttatgatcagtatcaggattggcgcctcgatgtcgacaacatgacatatgaggagttgctcgatcttgaggaccggattggatatgtaagtacagggcttcgtgaggacgagatcattcaaagccttaggatggtaaagtactccgcgttcaaccccagacatttttctacggaaatggacaggagatgtagcatctgtcaagaagagttcgaagtacacgaggaaactgggaagctgagctgtggccacagctatcacgtgcactgcataaagcagtggctttctcggaagaacgcttgtccggtttgcaagaccactgtctcgaagacctgaagtccctattctttctagtgtctgaaccacactttcattaagtataatccaattgaaatgcaaaagattagttctattgttgctgtacagtccagcagccgtctgcacgcacgcttgttgagtacagtatctagtacacgcacgcttgctgtacacacatgatcctagtatttatttgcatatggaacttacaatttttttc

SEQ ID NO: 41485 - protein, 316 aa, Zea mays subsp. mays
  peptide (1)..(316): Ceres Seq. ID no. 12454846
  misc_feature (269)..(309): Pfam Name: RING finger Pfam Description: Zinc finger, C3HC4 type
  misc_feature (68)..(288): NCBI GI NO: 34911396 NR Description: RING zinc finger protein-like
  misc_feature (273)..(316): NCBI GI NO: 34911396 NR Description: RING zinc finger protein-like
  misc_feature (193)..(255): NCBI GI NO: 34911396 NR Description: RING zinc finger protein-like
  misc_feature (192)..(310): NCBI GI NO: 15220912 NR Description: zinc-finger protein
  misc_feature (192)..(310): NCBI GI NO: 21554695 NR Description: zinc-finger protein (C-terminal), putative
  misc_feature (194)..(310): NCBI GI NO: 25511721 NR Description: F2H15.19 protein - Arabidopsis thaliana
  misc_feature (182)..(312): NCBI GI NO: 15220067 NR Description: hypothetical protein; protein id: At1g45180.1
  misc_feature (193)..(311): NCBI GI NO: 15219544 NR Description: putative RING zinc finger protein
  misc_feature (7)..(312): NCBI GI NO: 15239131 NR Description: putative protein; protein id: At5g42940
  misc_feature (150)..(316): NCBI GI NO: 38345496 NR Description: OSJNBa0010D21.9
MARDGGSRGSPGAERRRVALRALLASGGAEAEAARTSSKGLLRGLRCTSAAASQAIAPEIPRPPADWRGLGCAAAAQAHAPAAAVEAARPTADWRRLGCAAGAAPAVQAQAPRRSEEWRVRRRRNERERRKARAGGVSGGGGASAGMGVGGDVWCTPGIPFAAEASSVDCVVAPHHTVAARRRAEADRPRREMMFQTRMLLGRMGIYDQYQDWRLDVDNMTYEELLDLEDRIGYVSTGLREDEIIQSLRMVKYSAFNPRHFSTEMDRRCSICQEEFEVHEETGKLSCGHSYHVHCIKQWLSRKNACPVCKTTVSKT

SEQ ID NO: 41486 - protein, 251 aa, Zea mays subsp. mays
  peptide (1)..(251): Ceres Seq. ID no. 12454847
LSLQFNFRLSESSPHLPATEEAEAHERDAATAREEEEAKSNRTLNGSRRRQQRVTGGGAAAGGAACPPRVGWRGGGGREDVEQGPATRPSVHVRGRIAGYRAGDPAASGGLARTRLRRGGPGARAGCRGGSGPAHGGLAQAWVRGWSGTGGPGSSAPAFRGVAREAAEEREGEAEGEGWRRQWWWWGQCRDGRRRGRLVHAGHTVRRRGLFGGLRGGAAPYGGRAPPRRGRQAAERDDVPDKDVIGKNGYL

SEQ ID NO: 41487 - protein, 170 aa, Zea mays subsp. mays
  peptide (1)..(170): Ceres Seq. ID no. 12454848
  misc_feature (123)..(163): Pfam Name: RING finger Pfam Description: Zinc finger, C3HC4 type
  misc_feature (1)..(142): NCBI GI NO: 34911396 NR Description: RING zinc finger protein-like
  misc_feature (127)..(170): NCBI GI NO: 34911396 NR Description: RING zinc finger protein-like
  misc_feature (47)..(109): NCBI GI NO: 34911396 NR Description: RING zinc finger protein-like
  misc_feature (46)..(164): NCBI GI NO: 15220912 NR Description: zinc-finger protein
  misc_feature (46)..(164): NCBI GI NO: 21554695 NR Description: zinc-finger protein (C-terminal), putative
  misc_feature (48)..(164): NCBI GI NO: 25511721 NR Description: F2H15.19 protein - Arabidopsis thaliana
  misc_feature (36)..(166): NCBI GI NO: 15220067 NR Description: hypothetical protein; protein id: At1g45180.1
  misc_feature (47)..(165): NCBI GI NO: 15219544 NR Description: putative RING zinc finger protein
  misc_feature (1)..(166): NCBI GI NO: 15239131 NR Description: putative protein; protein id: At5g42940
  misc_feature (4)..(170): NCBI GI NO: 38345496 NR Description: OSJNBa0010D21.9
MGVGGDVWCTPGIPFAAEASSVDCVVAPHHTVAARRRAEADRPRREMMFQTRMLLGRMGIYDQYQDWRLDVDNMTYEELLDLEDRIGYVSTGLREDEIIQSLRMVKYSAFNPRHFSTEMDRRCSICQEEFEVHEETGKLSCGHSYHVHCIKQWLSRKNACPVCKTTVSKT

SEQ ID NO: 41488 - DNA, 1600 bp, Zea mays subsp. mays
  misc_feature (1)..(1600): Ceres Seq. ID no. 12364490
gcacgagaccattacctagaacatcctaatcgaaaacccagacccagagcttctcttctcaaaagatgcaggagcaggacgtggacgatggcggcggcaggacgacccagcagcaggagaagtcgatcgacgactggctccctatcaactcctccaggaaggccaagtggtggtactccgccttccacaatgtcaccgccatggtcggcgccggcgtgctcggcctcccctacgccatgtccgagcttggctggggccctggcatcgcggtgatgatcctgtcgtggataatcaccctatacacgctatggcagatggtggagatgcacgagatggtgcctgggaagcggttcgaccggtaccacgagctcgggcagcacgtcttcggcgacaggctgggcctctggatcgtggtgccgcagcagctggcagtagaggtgagcctgaacatcatctacatggtcaccggcggccagtccctcaagaagttccacgacgtcatctgcgacggcggcaggtgcggcggcgacttgaagctctcctacttcatcatgatcttcgcctccgtccacctggtcctctcccagctccccaacttcaactccatctccgccgtgtcgctcgccgccgccgtcatgtcgctcagttactccaccattgcgtggggcgcgtcgctgcacagagggaggagagaggacgtggactaccacctgcgcgccacgaccaccccagggaaggtgttcggcttcctgggaggcctaggggacgtggcgttcgcctactcggggcacaacgtggtgctggagatccaggccaccatcccgtccacgccggacaagccgtccaagaaggccatgtggaagggcgcctttgtcgcctacgtcgtcgtcgccatctgctacttccccgtcacgttcgtcgggtactgggccttcggcagcggcgtcgacgagaacatcctcatcacgctctccaagcccaagtggctcattgccctcgccaacatgatggtcgtcgtccatgtcattggcagttaccaggtttatgccatgccggtgtttgacatgatagagacggtgctggtcaagaaaatgaggttcgctccgagcctcacgctccgtcttattgcccggagcgtctatgttgcgttcacaatgtttctaggcatcactttccccttcttcggtggattgctcagtttcttcggcggattagccttcgcaccgacaacttattttcttccctgcatcatgtggctcaaggtttacaagcccaaacggttcggcctttcatggttcatcaactggatctgcatcgttattggagtgctgctgttgattctgggtccgataggagggctccggcagatcattttgtcagccaccacatacaaattctaccagtaaaatcgatcaactggagtcgtatggcgtggctgttttgttagcattacatttcttagggtggattggcttttaatgtacacgagcgagtgagattgatgctagtagctcctaggagtatatatatttctatcatccacagagcttaatgtatcttgtagttgggacattaaaagagcaagtaggctttactcgct

SEQ ID NO: 41489 - protein, 446 aa, Zea mays subsp. mays
  peptide (1)..(446): Ceres Seq. ID no. 12364491
  misc_feature (47)..(136): Pfam Name: Pfam Description:  Tryptophan/tyrosine permease family
  misc_feature (17)..(445): NCBI GI NO: 18395471 NR Description: putative lysine/histidine-specific permease
  misc_feature (17)..(445): NCBI GI NO: 15220504 NR Description: putative amino acid permease; protein id:At1g67640
  misc_feature (16)..(445): NCBI GI NO: 12597815 NR Description: lysine and histidine specific transporter
  misc_feature (16)..(445): NCBI GI NO: 22330117 NR Description: lysine and histidine specific transporter,putative
  misc_feature (17)..(445): NCBI GI NO: 2576361 NR Description: lysine and histidine specific transporter
  misc_feature (5)..(445): NCBI GI NO: 7489096 NR Description: amino acid permease 1 - wood tobacco
  misc_feature (15)..(436): NCBI GI NO: 15219896 NR Description: lysine and histidine specific transporter,putative
  misc_feature (15)..(436): NCBI GI NO: 15232176 NR Description: putative amino acid permease; protein id:At3g01760
  misc_feature (15)..(436): NCBI GI NO: 6091720 NR Description: putative amino acid permease
  misc_feature (1)..(445): NCBI GI NO: 25297692 NR Description: hypothetical protein F14O23.2
MQEQDVDDGGGRTTQQQEKSIDDWLPINSSRKAKWWYSAFHNVTAMVGAGVLGLPYAMSELGWGPGIAVMILSWIITLYTLWQMVEMHEMVPGKRFDRYHELGQHVFGDRLGLWIVVPQQLAVEVSLNIIYMVTGGQSLKKFHDVICDGGRCGGDLKLSYFIMIFASVHLVLSQLPNFNSISAVSLAAAVMSLSYSTIAWGASLHRGRREDVDYHLRATTTPGKVFGFLGGLGDVAFAYSGHNVVLEIQATIPSTPDKPSKKAMWKGAFVAYVVVAICYFPVTFVGYWAFGSGVDENILITLSKPKWLIALANMMVVVHVIGSYQVYAMPVFDMIETVLVKKMRFAPSLTLRLIARSVYVAFTMFLGITFPFFGGLLSFFGGLAFAPTTYFLPCIMWLKVYKPKRFGLSWFINWICIVIGVLLLILGPIGGLRQIILSATTYKFYQ

SEQ ID NO: 41490 - protein, 401 aa, Zea mays subsp. mays
  peptide (1)..(401): Ceres Seq. ID no. 12364492
  misc_feature (2)..(91): Pfam Name: Pfam Description:  Tryptophan/tyrosine permease family
  misc_feature (1)..(400): NCBI GI NO: 18395471 NR Description: putative lysine/histidine-specific permease
  misc_feature (1)..(400): NCBI GI NO: 15220504 NR Description: putative amino acid permease; protein id:At1g67640
  misc_feature (1)..(400): NCBI GI NO: 12597815 NR Description: lysine and histidine specific transporter
  misc_feature (1)..(400): NCBI GI NO: 22330117 NR Description: lysine and histidine specific transporter,putative
  misc_feature (1)..(400): NCBI GI NO: 2576361 NR Description: lysine and histidine specific transporter
  misc_feature (1)..(400): NCBI GI NO: 7489096 NR Description: amino acid permease 1 - wood tobacco
  misc_feature (1)..(391): NCBI GI NO: 15219896 NR Description: lysine and histidine specific transporter,putative
  misc_feature (1)..(391): NCBI GI NO: 15232176 NR Description: putative amino acid permease; protein id:At3g01760
  misc_feature (1)..(391): NCBI GI NO: 6091720 NR Description: putative amino acid permease
  misc_feature (1)..(400): NCBI GI NO: 25297692 NR Description: hypothetical protein F14O23.2
MVGAGVLGLPYAMSELGWGPGIAVMILSWIITLYTLWQMVEMHEMVPGKRFDRYHELGQHVFGDRLGLWIVVPQQLAVEVSLNIIYMVTGGQSLKKFHDVICDGGRCGGDLKLSYFIMIFASVHLVLSQLPNFNSISAVSLAAAVMSLSYSTIAWGASLHRGRREDVDYHLRATTTPGKVFGFLGGLGDVAFAYSGHNVVLEIQATIPSTPDKPSKKAMWKGAFVAYVVVAICYFPVTFVGYWAFGSGVDENILITLSKPKWLIALANMMVVVHVIGSYQVYAMPVFDMIETVLVKKMRFAPSLTLRLIARSVYVAFTMFLGITFPFFGGLLSFFGGLAFAPTTYFLPCIMWLKVYKPKRFGLSWFINWICIVIGVLLLILGPIGGLRQIILSATTYKFYQ

SEQ ID NO: 41491 - protein, 389 aa, Zea mays subsp. mays
  peptide (1)..(389): Ceres Seq. ID no. 12364493
  misc_feature (1)..(79): Pfam Name: Pfam Description:  Tryptophan/tyrosine permease family
  misc_feature (1)..(388): NCBI GI NO: 18395471 NR Description: putative lysine/histidine-specific permease
  misc_feature (1)..(388): NCBI GI NO: 15220504 NR Description: putative amino acid permease; protein id:At1g67640
  misc_feature (1)..(388): NCBI GI NO: 12597815 NR Description: lysine and histidine specific transporter
  misc_feature (1)..(388): NCBI GI NO: 22330117 NR Description: lysine and histidine specific transporter,putative
  misc_feature (1)..(388): NCBI GI NO: 2576361 NR Description: lysine and histidine specific transporter
  misc_feature (1)..(388): NCBI GI NO: 7489096 NR Description: amino acid permease 1 - wood tobacco
  misc_feature (1)..(379): NCBI GI NO: 15219896 NR Description: lysine and histidine specific transporter,putative
  misc_feature (1)..(379): NCBI GI NO: 15232176 NR Description: putative amino acid permease; protein id:At3g01760
  misc_feature (1)..(379): NCBI GI NO: 6091720 NR Description: putative amino acid permease
  misc_feature (1)..(388): NCBI GI NO: 25297692 NR Description: hypothetical protein F14O23.2
MSELGWGPGIAVMILSWIITLYTLWQMVEMHEMVPGKRFDRYHELGQHVFGDRLGLWIVVPQQLAVEVSLNIIYMVTGGQSLKKFHDVICDGGRCGGDLKLSYFIMIFASVHLVLSQLPNFNSISAVSLAAAVMSLSYSTIAWGASLHRGRREDVDYHLRATTTPGKVFGFLGGLGDVAFAYSGHNVVLEIQATIPSTPDKPSKKAMWKGAFVAYVVVAICYFPVTFVGYWAFGSGVDENILITLSKPKWLIALANMMVVVHVIGSYQVYAMPVFDMIETVLVKKMRFAPSLTLRLIARSVYVAFTMFLGITFPFFGGLLSFFGGLAFAPTTYFLPCIMWLKVYKPKRFGLSWFINWICIVIGVLLLILGPIGGLRQIILSATTYKFYQ

SEQ ID NO: 41492 - DNA, 1046 bp, Zea mays subsp. mays; identical to SEQ ID NO: 29758
  misc_feature (1)..(1046): Ceres Seq. ID no. 12345398

SEQ ID NO: 41493 - protein, 248 aa, Zea mays subsp. mays; identical to SEQ ID NO: 29759
  peptide (1)..(248): Ceres Seq. ID no. 12345399
  misc_feature (86)..(240): Pfam Name: Pfam Description:  Inorganic pyrophosphatase
  misc_feature (43)..(248): NCBI GI NO: 3885882 NR Description: inorganic pyrophosphatase [Oryza sativa]
  misc_feature (54)..(248): NCBI GI NO: 15231849 NR Description: inorganic pyrophosphatase -like protein
  misc_feature (54)..(248): NCBI GI NO: 21593570 NR Description: inorganic pyrophosphatase-like protein
  misc_feature (51)..(248): NCBI GI NO: 15223288 NR Description: soluble inorganic pyrophosphatase, putative
  misc_feature (51)..(248): NCBI GI NO: 40642617 NR Description: soluble pyrophosphatase [Beta vulgaris]
  misc_feature (51)..(248): NCBI GI NO: 2500047 NR Description: Soluble inorganic pyrophosphatase
  misc_feature (51)..(248): NCBI GI NO: 5669924 NR Description: soluble inorganic pyrophosphatase
  misc_feature (54)..(248): NCBI GI NO: 15226453 NR Description: putative inorganic pyrophosphatase
  misc_feature (51)..(248): NCBI GI NO: 4033424 NR Description: Soluble inorganic pyrophosphatase
  misc_feature (54)..(248): NCBI GI NO: 26451240 NR Description: putative inorganic pyrophosphatase

SEQ ID NO: 41494 - protein, 201 aa, Zea mays subsp. mays; identical to SEQ ID NO: 29760
  peptide (1)..(201): Ceres Seq. ID no. 12345400
  misc_feature (39)..(193): Pfam Name: Pfam Description:  Inorganic pyrophosphatase
  misc_feature (1)..(201): NCBI GI NO: 3885882 NR Description: inorganic pyrophosphatase [Oryza sativa]
  misc_feature (7)..(201): NCBI GI NO: 15231849 NR Description: inorganic pyrophosphatase -like protein
  misc_feature (7)..(201): NCBI GI NO: 21593570 NR Description: inorganic pyrophosphatase-like protein
  misc_feature (4)..(201): NCBI GI NO: 15223288 NR Description: soluble inorganic pyrophosphatase, putative
  misc_feature (4)..(201): NCBI GI NO: 40642617 NR Description: soluble pyrophosphatase [Beta vulgaris]
  misc_feature (4)..(201): NCBI GI NO: 2500047 NR Description: Soluble inorganic pyrophosphatase
  misc_feature (4)..(201): NCBI GI NO: 5669924 NR Description: soluble inorganic pyrophosphatase
  misc_feature (7)..(201): NCBI GI NO: 15226453 NR Description: putative inorganic pyrophosphatase
  misc_feature (4)..(201): NCBI GI NO: 4033424 NR Description: Soluble inorganic pyrophosphatase
  misc_feature (7)..(201): NCBI GI NO: 26451240 NR Description: putative inorganic pyrophosphatase

SEQ ID NO: 41495 - DNA, 1729 bp, Zea mays subsp. mays
  misc_feature (1)..(1729): Ceres Seq. ID no. 12381747
gcacgagaccattacctagaacatcctaatcgaaaagattgattgattgggttcctggcgttagtttgcgcgattcgggcagaggagtagacggttccagcaaatttggtccaacaattctttgtttggccgcttgggctccggtctctcgattcttcgtagcttggtgggagggcgccggatccagcggccatcatggttgtcgacacggtcagcgcgagcacctccataatagccccccacctgttcgaccacaggtccaggggcgccggcgcttcccaccaccacctccgccggacgttccatgtcgtcgcctgccgacccctgcccaccgccttcgccggccgccgcctcgtggcccgggtcaccaggcagccgtcgtcgcgcctcgccgattggccggtcagggcgctggctatgggggtcacgaaggaggtcagggccagccctcgcagggagtaccgggggatccccggggatggtggagacatgggggacgttggggtcaccagccccacgccgtcatggcctccgcggaacagggcagatgaccccaagctgcataacccgctgctccgcctcgagcgcatgggctgcgggtggctcggcgtcatcttcgagtgggagggggtcatcgttgaggatgatgccgaattggaaaggcaggcgtggttgaccctggcacaggaggagggcaagtcgccgcctcccgcttttctgttgcggagagtcgaagggatgaagaacgagcaggcgatttctgaggttctctgctggtctcgggatccctccgagcttaggagattggccctgaggaaggacgagatccacagcagccttcgaggtggctcctaccaccagatgaggaacggttccagggagttcatgagcacgctcgccaattacaagatccctatcgctgtggtgaccacacgcccacggaaggttattgaggaagccattgaagctgtaggcgtgcgcagcttcttcgatgcggttgtgacagcagaagacgtgtaccggggcaagcctgacccagaaatgttcctgtacgctgctcagcttctcagtttcatcccggagaggtgcatcgtgtttgggaactccaattcggcggtggaagctgcgcatgacgcacgtatgaagtgtgtcgcggtcgcaagcaagcacaagatctacgagcttagcgctgcagaccttgtggtgaagcaactagacgagctatccgtcgttgacttgaagaaccttgctgatattgagtccccggagtttggcatggaacctgaaccagagatggaggaggaggaagtgcccccaccatcgacgtctgtgggtatagatgatctattctggtaagagaccaaattgtacatttgattgattcctctccagaacacagatgtattgttgtcaactgtcatagtgatcagaaagaagggcttatcatccttctgtaatcagtagaatgtgatatgtaaaaaatgttgtctagagctcacacactgtatatacatactcagaaagaaagctgggaactgaatatatgaatcagaacatttgaatctgcagttcctgaaacaatgtaacaccacaaggtttctgtcgccgaatcagtattccggatgctgattatattgttctctgcagtcttcttgccaaaaaaaaaaaaaaaaaaaaaaaaaaaaaaagaaaaaaaaaaaaaaaaaacggcacgagaagccggcacgag

SEQ ID NO: 41496 - protein, 386 aa, Zea mays subsp. mays
  peptide (1)..(386): Ceres Seq. ID no. 12381748
  misc_feature (136)..(324): Pfam Name: Pfam Description:  haloacid dehalogenase-like hydrolase
  misc_feature (43)..(383): NCBI GI NO: 15234236 NR Description: putative protein; protein id: At4g11570
  misc_feature (138)..(368): NCBI GI NO: 10444400 NR Description: genetic modifier [Zea mays]
  misc_feature (138)..(368): NCBI GI NO: 18542168 NR Description: putative genetic modifier [Zea mays]
  misc_feature (120)..(372): NCBI GI NO: 38345597 NR Description: OSJNBb0012E24.15
  misc_feature (138)..(385): NCBI GI NO: 18399067 NR Description: expressed protein; protein id: At3g10970
  misc_feature (138)..(385): NCBI GI NO: 21592870 NR Description: unknown [Arabidopsis thaliana]
  misc_feature (138)..(385): NCBI GI NO: 14532506 NR Description: AT3g10970/F9F8_21 [Arabidopsis thaliana]
  misc_feature (185)..(385): NCBI GI NO: 6016697 NR Description: unknown protein [Arabidopsis thaliana]
  misc_feature (140)..(341): NCBI GI NO: 21672855 NR Description: hydrolase, haloacid dehalogenase-like family
  misc_feature (139)..(346): NCBI GI NO: 21220059 NR Description: putative phosphatase
MVVDTVSASTSIIAPHLFDHRSRGAGASHHHLRRTFHVVACRPLPTAFAGRRLVARVTRQPSSRLADWPVRALAMGVTKEVRASPRREYRGIPGDGGDMGDVGVTSPTPSWPPRNRADDPKLHNPLLRLERMGCGWLGVIFEWEGVIVEDDAELERQAWLTLAQEEGKSPPPAFLLRRVEGMKNEQAISEVLCWSRDPSELRRLALRKDEIHSSLRGGSYHQMRNGSREFMSTLANYKIPIAVVTTRPRKVIEEAIEAVGVRSFFDAVVTAEDVYRGKPDPEMFLYAAQLLSFIPERCIVFGNSNSAVEAAHDARMKCVAVASKHKIYELSAADLVVKQLDELSVVDLKNLADIESPEFGMEPEPEMEEEEVPPPSTSVGIDDLFW

SEQ ID NO: 41497 - protein, 312 aa, Zea mays subsp. mays
  peptide (1)..(312): Ceres Seq. ID no. 12381749
  misc_feature (62)..(250): Pfam Name: Pfam Description:  haloacid dehalogenase-like hydrolase
  misc_feature (1)..(309): NCBI GI NO: 15234236 NR Description: putative protein; protein id: At4g11570
  misc_feature (64)..(294): NCBI GI NO: 10444400 NR Description: genetic modifier [Zea mays]
  misc_feature (64)..(294): NCBI GI NO: 18542168 NR Description: putative genetic modifier [Zea mays]
  misc_feature (46)..(298): NCBI GI NO: 38345597 NR Description: OSJNBb0012E24.15
  misc_feature (64)..(311): NCBI GI NO: 18399067 NR Description: expressed protein; protein id: At3g10970
  misc_feature (64)..(311): NCBI GI NO: 21592870 NR Description: unknown [Arabidopsis thaliana]
  misc_feature (64)..(311): NCBI GI NO: 14532506 NR Description: AT3g10970/F9F8_21 [Arabidopsis thaliana]
  misc_feature (111)..(311): NCBI GI NO: 6016697 NR Description: unknown protein [Arabidopsis thaliana]
  misc_feature (66)..(267): NCBI GI NO: 21672855 NR Description: hydrolase, haloacid dehalogenase-like family
  misc_feature (65)..(272): NCBI GI NO: 21220059 NR Description: putative phosphatase
MGVTKEVRASPRREYRGIPGDGGDMGDVGVTSPTPSWPPRNRADDPKLHNPLLRLERMGCGWLGVIFEWEGVIVEDDAELERQAWLTLAQEEGKSPPPAFLLRRVEGMKNEQAISEVLCWSRDPSELRRLALRKDEIHSSLRGGSYHQMRNGSREFMSTLANYKIPIAVVTTRPRKVIEEAIEAVGVRSFFDAVVTAEDVYRGKPDPEMFLYAAQLLSFIPERCIVFGNSNSAVEAAHDARMKCVAVASKHKIYELSAADLVVKQLDELSVVDLKNLADIESPEFGMEPEPEMEEEEVPPPSTSVGIDDLFW

SEQ ID NO: 41498 - protein, 288 aa, Zea mays subsp. mays
  peptide (1)..(288): Ceres Seq. ID no. 12381750
  misc_feature (38)..(226): Pfam Name: Pfam Description:  haloacid dehalogenase-like hydrolase
  misc_feature (1)..(285): NCBI GI NO: 15234236 NR Description: putative protein; protein id: At4g11570
  misc_feature (40)..(270): NCBI GI NO: 10444400 NR Description: genetic modifier [Zea mays]
  misc_feature (40)..(270): NCBI GI NO: 18542168 NR Description: putative genetic modifier [Zea mays]
  misc_feature (22)..(274): NCBI GI NO: 38345597 NR Description: OSJNBb0012E24.15
  misc_feature (40)..(287): NCBI GI NO: 18399067 NR Description: expressed protein; protein id: At3g10970
  misc_feature (40)..(287): NCBI GI NO: 21592870 NR Description: unknown [Arabidopsis thaliana]
  misc_feature (40)..(287): NCBI GI NO: 14532506 NR Description: AT3g10970/F9F8_21 [Arabidopsis thaliana]
  misc_feature (87)..(287): NCBI GI NO: 6016697 NR Description: unknown protein [Arabidopsis thaliana]
  misc_feature (42)..(243): NCBI GI NO: 21672855 NR Description: hydrolase, haloacid dehalogenase-like family
  misc_feature (41)..(248): NCBI GI NO: 21220059 NR Description: putative phosphatase
MGDVGVTSPTPSWPPRNRADDPKLHNPLLRLERMGCGWLGVIFEWEGVIVEDDAELERQAWLTLAQEEGKSPPPAFLLRRVEGMKNEQAISEVLCWSRDPSELRRLALRKDEIHSSLRGGSYHQMRNGSREFMSTLANYKIPIAVVTTRPRKVIEEAIEAVGVRSFFDAVVTAEDVYRGKPDPEMFLYAAQLLSFIPERCIVFGNSNSAVEAAHDARMKCVAVASKHKIYELSAADLVVKQLDELSVVDLKNLADIESPEFGMEPEPEMEEEEVPPPSTSVGIDDLFW

SEQ ID NO: 41499 - DNA, 1577 bp, Zea mays subsp. mays; identical to SEQ ID NO: 32162
  misc_feature (1)..(1577): Ceres Seq. ID no. 12595047

SEQ ID NO: 41500 - protein, 421 aa, Zea mays subsp. mays; identical to SEQ ID NO: 32163
  peptide (1)..(421): Ceres Seq. ID no. 12595048
  misc_feature (43)..(421): NCBI GI NO: 113377 NR Description: ALCOHOL DEHYDROGENASE 2
  misc_feature (43)..(421): NCBI GI NO: 6979319 NR Description: alcohol dehydrogenase 2 [Oryza sativa]
  misc_feature (43)..(420): NCBI GI NO: 539057 NR Description: alcohol dehydrogenase (EC 1
  misc_feature (43)..(420): NCBI GI NO: 113385 NR Description: ALCOHOL DEHYDROGENASE 3
  misc_feature (43)..(420): NCBI GI NO: 13872817 NR Description: alcohol dehydrogenase [Pennisetum glaucum]
  misc_feature (43)..(421): NCBI GI NO: 82669 NR Description: alcohol dehydrogenase (EC 1.1.1.1) 1 - maize
  misc_feature (43)..(421): NCBI GI NO: 22122 NR Description: alcohol dehydrogenase 1 [Zea mays]
  misc_feature (43)..(421): NCBI GI NO: 113362 NR Description: Alcohol dehydrogenase 1 (ADH slow-allele)
  misc_feature (43)..(421): NCBI GI NO: 3420019 NR Description: putative alcohol dehydrogenase 1 [Sorghum bicolor]
  misc_feature (43)..(421): NCBI GI NO: 113359 NR Description: Alcohol dehydrogenase 1

SEQ ID NO: 41501 - protein, 379 aa, Zea mays subsp. mays; identical to SEQ ID NO: 32164
  peptide (1)..(379): Ceres Seq. ID no. 12595049
  misc_feature (1)..(379): NCBI GI NO: 113377 NR Description: ALCOHOL DEHYDROGENASE 2
  misc_feature (1)..(379): NCBI GI NO: 6979319 NR Description: alcohol dehydrogenase 2 [Oryza sativa]
  misc_feature (1)..(378): NCBI GI NO: 539057 NR Description: alcohol dehydrogenase (EC 1
  misc_feature (1)..(378): NCBI GI NO: 113385 NR Description: ALCOHOL DEHYDROGENASE 3
  misc_feature (1)..(378): NCBI GI NO: 13872817 NR Description: alcohol dehydrogenase [Pennisetum glaucum]
  misc_feature (1)..(379): NCBI GI NO: 82669 NR Description: alcohol dehydrogenase (EC 1.1.1.1) 1 - maize
  misc_feature (1)..(379): NCBI GI NO: 22122 NR Description: alcohol dehydrogenase 1 [Zea mays]
  misc_feature (1)..(379): NCBI GI NO: 113362 NR Description: Alcohol dehydrogenase 1 (ADH slow-allele)
  misc_feature (1)..(379): NCBI GI NO: 3420019 NR Description: putative alcohol dehydrogenase 1 [Sorghum bicolor]
  misc_feature (1)..(379): NCBI GI NO: 113359 NR Description: Alcohol dehydrogenase 1

SEQ ID NO: 41502 - protein, 345 aa, Zea mays subsp. mays; identical to SEQ ID NO: 32165
  peptide (1)..(345): Ceres Seq. ID no. 12595050
  misc_feature (1)..(345): NCBI GI NO: 113377 NR Description: ALCOHOL DEHYDROGENASE 2
  misc_feature (1)..(345): NCBI GI NO: 6979319 NR Description: alcohol dehydrogenase 2 [Oryza sativa]
  misc_feature (1)..(344): NCBI GI NO: 539057 NR Description: alcohol dehydrogenase (EC 1
  misc_feature (1)..(344): NCBI GI NO: 113385 NR Description: ALCOHOL DEHYDROGENASE 3
  misc_feature (1)..(344): NCBI GI NO: 13872817 NR Description: alcohol dehydrogenase [Pennisetum glaucum]
  misc_feature (1)..(345): NCBI GI NO: 82669 NR Description: alcohol dehydrogenase (EC 1.1.1.1) 1 - maize
  misc_feature (1)..(345): NCBI GI NO: 22122 NR Description: alcohol dehydrogenase 1 [Zea mays]
  misc_feature (1)..(345): NCBI GI NO: 113362 NR Description: Alcohol dehydrogenase 1 (ADH slow-allele)
  misc_feature (1)..(345): NCBI GI NO: 3420019 NR Description: putative alcohol dehydrogenase 1 [Sorghum bicolor]
  misc_feature (1)..(345): NCBI GI NO: 113359 NR Description: Alcohol dehydrogenase 1

SEQ ID NO: 41503 - DNA, 2763 bp, Zea mays subsp. mays; identical to SEQ ID NO: 41338
  misc_feature (1)..(2763): Ceres Seq. ID no. 13635181

SEQ ID NO: 41504 - protein, 814 aa, Zea mays subsp. mays; identical to SEQ ID NO: 41339
  peptide (1)..(814): Ceres Seq. ID no. 13635182
  misc_feature (108)..(814): NCBI GI NO: 1771261 NR Description: 1,4-alpha-glucan branching enzyme
  misc_feature (132)..(814): NCBI GI NO: 7433857 NR Description: 1,4-alpha-glucan branching enzyme (EC 2
  misc_feature (132)..(814): NCBI GI NO: 4586236 NR Description: starch branching enzyme I [Triticum aestivum]
  misc_feature (132)..(814): NCBI GI NO: 11037532 NR Description: starch branching enyzyme 1 [Triticum aestivum]
  misc_feature (132)..(814): NCBI GI NO: 4586237 NR Description: starch branching enzyme I [Triticum aestivum]
  misc_feature (132)..(814): NCBI GI NO: 5441248 NR Description: branching enzyme 3 [Phaseolus vulgaris]
  misc_feature (132)..(806): NCBI GI NO: 283000 NR Description: 1,4-alpha-glucan branching enzyme (EC 2
  misc_feature (132)..(806): NCBI GI NO: 399544 NR Description: 1,4-alpha-glucan branching enzyme
  misc_feature (111)..(814): NCBI GI NO: 7547156 NR Description: seed starch branching enzyme [Sorghum bicolor]
  misc_feature (132)..(806): NCBI GI NO: 7433851 NR Description: 1,4-alpha-glucan branching enzyme (EC 2

SEQ ID NO: 41505 - protein, 677 aa, Zea mays subsp. mays; identical to SEQ ID NO: 41340
  peptide (1)..(677): Ceres Seq. ID no. 13635183
  misc_feature (1)..(677): NCBI GI NO: 1771261 NR Description: 1,4-alpha-glucan branching enzyme
  misc_feature (1)..(677): NCBI GI NO: 7433857 NR Description: 1,4-alpha-glucan branching enzyme (EC 2
  misc_feature (1)..(677): NCBI GI NO: 4586236 NR Description: starch branching enzyme I [Triticum aestivum]
  misc_feature (1)..(677): NCBI GI NO: 11037532 NR Description: starch branching enyzyme 1 [Triticum aestivum]
  misc_feature (1)..(677): NCBI GI NO: 4586237 NR Description: starch branching enzyme I [Triticum aestivum]
  misc_feature (1)..(677): NCBI GI NO: 5441248 NR Description: branching enzyme 3 [Phaseolus vulgaris]
  misc_feature (1)..(669): NCBI GI NO: 283000 NR Description: 1,4-alpha-glucan branching enzyme (EC 2
  misc_feature (1)..(669): NCBI GI NO: 399544 NR Description: 1,4-alpha-glucan branching enzyme
  misc_feature (1)..(677): NCBI GI NO: 7547156 NR Description: seed starch branching enzyme [Sorghum bicolor]
  misc_feature (1)..(669): NCBI GI NO: 7433851 NR Description: 1,4-alpha-glucan branching enzyme (EC 2

SEQ ID NO: 41506 - protein, 601 aa, Zea mays subsp. mays; identical to SEQ ID NO: 41341
  peptide (1)..(601): Ceres Seq. ID no. 13635184
  misc_feature (1)..(601): NCBI GI NO: 1771261 NR Description: 1,4-alpha-glucan branching enzyme
  misc_feature (1)..(601): NCBI GI NO: 7433857 NR Description: 1,4-alpha-glucan branching enzyme (EC 2
  misc_feature (1)..(601): NCBI GI NO: 4586236 NR Description: starch branching enzyme I [Triticum aestivum]
  misc_feature (1)..(601): NCBI GI NO: 4586237 NR Description: starch branching enzyme I [Triticum aestivum]
  misc_feature (1)..(601): NCBI GI NO: 11037532 NR Description: starch branching enyzyme 1 [Triticum aestivum]
  misc_feature (1)..(601): NCBI GI NO: 5441248 NR Description: branching enzyme 3 [Phaseolus vulgaris]
  misc_feature (1)..(593): NCBI GI NO: 283000 NR Description: 1,4-alpha-glucan branching enzyme (EC 2
  misc_feature (1)..(593): NCBI GI NO: 399544 NR Description: 1,4-alpha-glucan branching enzyme
  misc_feature (1)..(601): NCBI GI NO: 7547156 NR Description: seed starch branching enzyme [Sorghum bicolor]
  misc_feature (1)..(593): NCBI GI NO: 7433851 NR Description: 1,4-alpha-glucan branching enzyme (EC 2

SEQ ID NO: 41507 - DNA, 1795 bp, Zea mays subsp. mays
  misc_feature (1)..(1795): Ceres Seq. ID no. 12381755
gcacgagaccattacctagaacatcctaatcaaaactcccgatctcaccaccgcctcgcgatctcccccccgccgccatggctttctccgcgcggaggagcctcgccaccagcctgtcacaccacttctccggccgcctctacccctctatctcgcacctcgttccttcccaccacgagcactccgaccccgctccctccccctcccccgtgccgcagcctcggccccaatcgtcgcagcaatccgcaccaccgttcccctccgcgcttcctcggccgtcgagatcccgggccctggcccccttccccctccctttcgctctccacctcgcggcccaccgctactcctccgccccggcccccgactcggaggtcttggcggactccgccgccgcggcccctgtgtcggagctgctctccgatggggtggcgtcagctgccgcgtccgtctccacgccgccgttgccgtaccccggggaggtcgctgccgccgcggccgaatcatttccacccgtcgcggcgctgcagcacctgctggacgccgttcaatccttcaccggcctcaactggtgggcgactattgcgctgacgacgttgatgatccggctggcgactgtcccgctgctgatcaaccagatgaagtccatgatgaagttaaatgagatgagaccagaaattgaagccatcaatgaagagatgcgaaattcaactgatccaaggtcaatggaagtggggaaacagaaactgggggagctattccttagacatggagtgactccattgacaccattgaagggtctattcatacagggacctatatttatgagctttttctttgctatatcaaatatggttgagaaagtcccttctatgaaaggaggtggtgtgtattggtttactgatttgacaactcctgataatttattaatcctcccagtgttaacatcactgacctttttggctacagtagagcttaatatgcaagatggcatggaagggaatcatatgttaaaaccaatgaaaaagttctcccggttttttggagttttgtttgttccatttacaataggctttccaaaggcaattttcttttactgggtcacatcaaactttttctcacttgtttacggcgctgttctccggaatccggctgtaagacttttcttaaatcttcctcgcttggaatctcagcccacaactgcagaagtccagcccttaaacctatcgggcggaccagagccaagtcctggagtcgattctcctatcacagataaggaaactgagcagtcgagttctgtgctaagtcctggagtcgattctcctatagcagacaaggaatgtgagcagtcgagtcctgcggtgagtcctgaagtcaattctcctatggtggacaaggaaagtgagcagtcgagttctgtgttatgtgaccgtatcagagatcttgagatcagggctaaagcaacgggtgaatctcgagagtaaattcgtgatttgtccacatggaagtaagcaagcacatctcctttgggggtttctggtacttttttttttttgttgggagcaaaggatacccagtagcgaggtataattttgaagagtccgcggtttttcgaaatataacggcccaccatgtttccgtgaataaattggtgtagtatattggcttgtaaaatcgttgcacggtatgatataaccttgtactactagctaacattagccatgatgttccttggattaagcatattgttgctattgagcggcacacgacatgtttgtctaatatttgcttcatgcgg

SEQ ID NO: 41508 - protein, 467 aa, Zea mays subsp. mays
  peptide (1)..(467): Ceres Seq. ID no. 12381756
  misc_feature (163)..(359): Pfam Name: Pfam Description:  60Kd inner membrane protein
  misc_feature (31)..(405): NCBI GI NO: 22122905 NR Description: putative cytochrome oxidase assembly protein
  misc_feature (31)..(405): NCBI GI NO: 37536158 NR Description: putative Oxa1 protein
  misc_feature (20)..(407): NCBI GI NO: 15225991 NR Description: OXA1 protein
  misc_feature (77)..(372): NCBI GI NO: 15241690 NR Description: OXA1 protein (OXA1p); protein id: At5g62050
  misc_feature (49)..(367): NCBI GI NO: 26346514 NR Description: unnamed protein product [Mus musculus]
  misc_feature (49)..(367): NCBI GI NO: 38372481 NR Description: Inner membrane protein OXA1L
  misc_feature (49)..(367): NCBI GI NO: 12841194 NR Description: unnamed protein product [Mus musculus]
  misc_feature (72)..(373): NCBI GI NO: 34874107 NR Description: similar to Cytochrome oxidase biogenesis proteinOXA1
  misc_feature (61)..(367): NCBI GI NO: 4826880 NR Description: oxidase (cytochrome c) assembly 1-like
  misc_feature (61)..(367): NCBI GI NO: 37589026 NR Description: Oxidase (cytochrome c) assembly 1-like
MAFSARRSLATSLSHHFSGRLYPSISHLVPSHHEHSDPAPSPSPVPQPRPQSSQQSAPPFPSALPRPSRSRALAPFPLPFALHLAAHRYSSAPAPDSEVLADSAAAAPVSELLSDGVASAAASVSTPPLPYPGEVAAAAAESFPPVAALQHLLDAVQSFTGLNWWATIALTTLMIRLATVPLLINQMKSMMKLNEMRPEIEAINEEMRNSTDPRSMEVGKQKLGELFLRHGVTPLTPLKGLFIQGPIFMSFFFAISNMVEKVPSMKGGGVYWFTDLTTPDNLLILPVLTSLTFLATVELNMQDGMEGNHMLKPMKKFSRFFGVLFVPFTIGFPKAIFFYWVTSNFFSLVYGAVLRNPAVRLFLNLPRLESQPTTAEVQPLNLSGGPEPSPGVDSPITDKETEQSSSVLSPGVDSPIADKECEQSSPAVSPEVNSPMVDKESEQSSSVLCDRIRDLEIRAKATGESRE

SEQ ID NO: 41509 - protein, 294 aa, Zea mays subsp. mays
  peptide (1)..(294): Ceres Seq. ID no. 12381757
  misc_feature (1)..(186): Pfam Name: Pfam Description:  60Kd inner membrane protein
  misc_feature (1)..(232): NCBI GI NO: 22122905 NR Description: putative cytochrome oxidase assembly protein
  misc_feature (1)..(232): NCBI GI NO: 37536158 NR Description: putative Oxa1 protein
  misc_feature (1)..(234): NCBI GI NO: 15225991 NR Description: OXA1 protein
  misc_feature (1)..(199): NCBI GI NO: 15241690 NR Description: OXA1 protein (OXA1p); protein id: At5g62050
  misc_feature (1)..(194): NCBI GI NO: 26346514 NR Description: unnamed protein product [Mus musculus]
  misc_feature (1)..(194): NCBI GI NO: 38372481 NR Description: Inner membrane protein OXA1L
  misc_feature (1)..(194): NCBI GI NO: 12841194 NR Description: unnamed protein product [Mus musculus]
  misc_feature (1)..(200): NCBI GI NO: 34874107 NR Description: similar to Cytochrome oxidase biogenesis proteinOXA1
  misc_feature (1)..(194): NCBI GI NO: 4826880 NR Description: oxidase (cytochrome c) assembly 1-like
  misc_feature (1)..(194): NCBI GI NO: 37589026 NR Description: Oxidase (cytochrome c) assembly 1-like
MIRLATVPLLINQMKSMMKLNEMRPEIEAINEEMRNSTDPRSMEVGKQKLGELFLRHGVTPLTPLKGLFIQGPIFMSFFFAISNMVEKVPSMKGGGVYWFTDLTTPDNLLILPVLTSLTFLATVELNMQDGMEGNHMLKPMKKFSRFFGVLFVPFTIGFPKAIFFYWVTSNFFSLVYGAVLRNPAVRLFLNLPRLESQPTTAEVQPLNLSGGPEPSPGVDSPITDKETEQSSSVLSPGVDSPIADKECEQSSPAVSPEVNSPMVDKESEQSSSVLCDRIRDLEIRAKATGESRE

SEQ ID NO: 41510 - protein, 281 aa, Zea mays subsp. mays
  peptide (1)..(281): Ceres Seq. ID no. 12381758
  misc_feature (1)..(173): Pfam Name: Pfam Description:  60Kd inner membrane protein
  misc_feature (1)..(219): NCBI GI NO: 22122905 NR Description: putative cytochrome oxidase assembly protein
  misc_feature (1)..(219): NCBI GI NO: 37536158 NR Description: putative Oxa1 protein
  misc_feature (1)..(221): NCBI GI NO: 15225991 NR Description: OXA1 protein
  misc_feature (1)..(186): NCBI GI NO: 15241690 NR Description: OXA1 protein (OXA1p); protein id: At5g62050
  misc_feature (1)..(181): NCBI GI NO: 26346514 NR Description: unnamed protein product [Mus musculus]
  misc_feature (1)..(181): NCBI GI NO: 38372481 NR Description: Inner membrane protein OXA1L
  misc_feature (1)..(181): NCBI GI NO: 12841194 NR Description: unnamed protein product [Mus musculus]
  misc_feature (1)..(187): NCBI GI NO: 34874107 NR Description: similar to Cytochrome oxidase biogenesis proteinOXA1
  misc_feature (1)..(181): NCBI GI NO: 4826880 NR Description: oxidase (cytochrome c) assembly 1-like
  misc_feature (1)..(181): NCBI GI NO: 37589026 NR Description: Oxidase (cytochrome c) assembly 1-like
MKSMMKLNEMRPEIEAINEEMRNSTDPRSMEVGKQKLGELFLRHGVTPLTPLKGLFIQGPIFMSFFFAISNMVEKVPSMKGGGVYWFTDLTTPDNLLILPVLTSLTFLATVELNMQDGMEGNHMLKPMKKFSRFFGVLFVPFTIGFPKAIFFYWVTSNFFSLVYGAVLRNPAVRLFLNLPRLESQPTTAEVQPLNLSGGPEPSPGVDSPITDKETEQSSSVLSPGVDSPIADKECEQSSPAVSPEVNSPMVDKESEQSSSVLCDRIRDLEIRAKATGESRE

SEQ ID NO: 41511 - DNA, 2022 bp, Zea mays subsp. mays
  misc_feature (1)..(2022): Ceres Seq. ID no. 12378252
gcacgagaccattacctagaacatcctaatcaaaaacccggccgatcccgcacccctgactgtcagccgcgatccgctcttgtaggctccctccctctccgacccgcgtctccctcctcccactccactgctcctggtctctctctctctctccttctcctccccccgtccgtggccggagatcgacggtttccattttccagatcgcagttcattcagttgctctgttacctttacacggtctgcatgcctctattgtgtctgcagttttgcgtgcagcggcggagcaggagagatggcgtcggaggccaaggacgtgggcatcctcgccatggacatctacttcccgcccaactgcgtgctccaggaagagttggaaacacatgatggcgtgagcaaagggaagtataccattgggcttgggcaggaaagtatggcattttgcactgaagttgaggatgttatttcgatgagcttgacagtggtgaagtccctcctgaaaaattataacattgacccaatgtgcattggacgtttggaagttggcagtgaaacagtaatagacaagagcaagtctataaagacatggctgatgcagatatttgaggaatctggcaatactgatattgaaggagttgactcctctaatgcatgttatggtggaacagctgcattgtttaattgtgttaactgggttgaaagcaagtcatgggatggtcgctatggacttgttgtttgcacagacagtgcggtttacgctgaaggtccggctcgccctactggtggtgcggctgctattgcaatgctgattggaccaaatgctcctatttgttttgaaagtaaatatagaggatctcatatggcccatgtatacgacttttacaagcccgatcttgcgagtgaatatccggtggttgatgggaagctatcacaaacatgctacctcatggcattggactcctgctacaatgtattttgcaaaaagtatgaaaaacatgaggggaagcagttttcaatttctgatgcagattatgttgtgttccattctccatacaacaagcttgtacagaaaagcttcgctcgtttgtactacaatgatttcttgagaaactgcagcacggttgatggagagtcaagggaaaaattggcaccctatgcaggcttgtcatctgaagaaagctaccagagtcgcgaccttgaaaaggcatctcagcaagtcgccaagaatctgtacgagaccaaggttcagccaacaacattgatcccaaaacaagttgggaatatgtatacagcatcactctacgcagctcttgcatcggttgtccatagtaggcatgaaactctggcaggccagaggattgttatgttttcgtatggcagtgggttgacatcaacaatgttctctttcatgattaatgaaggccatcaccctttcagtctgctaaacatcgcaaacatactggatatttccaagaagctgaaggcaaggcacgtggttcccccagagaaatttgtggaggcactgaaactgatggagcaccgctatggggcaagagatttcgtgacgaatcaagatacaagtctgctatccgcaggcacatactatctcacgcacgttgactccaagtacagaaggttctacgacgtgaaaggtgacggtgtcgccactgcaatgtccaacggccactgatctttcttctgcccgaagctgcaacaagtcaaataacagaggcaagtgtcctaagcatccttagattattatatctattaagaggggaagctcgagttatagattaatctatgcccagctgtaaggttgtaaagttagttagagctgcgcatgcttgtttagtaaaagctctgctgctcttcagttatttagcgaatcaagcacactgctgggctaataagaattgtaaacaataatctgcagaatcactggctacatccaggttatgctgatgaatgcacgatttcatgtttaacacgatcaatgcatctggttacatccaggttatgctg

SEQ ID NO: 41512 - protein, 464 aa, Zea mays subsp. mays
  peptide (1)..(464): Ceres Seq. ID no. 12378253
  misc_feature (5)..(452): Pfam Name: Pfam Description:  Hydroxymethylglutaryl-coenzyme A synthase
  misc_feature (5)..(464): NCBI GI NO: 16417956 NR Description: hydroxymethylglutaryl coenzyme A synthase
  misc_feature (5)..(464): NCBI GI NO: 14916100 NR Description: hydroxymethylglutaryl coenzyme A synthase
  misc_feature (5)..(464): NCBI GI NO: 11192005 NR Description: HMG-CoA synthase [Brassica juncea]
  misc_feature (5)..(464): NCBI GI NO: 7799986 NR Description: HMG-CoA synthase [Brassica juncea]
  misc_feature (5)..(464): NCBI GI NO: 11192003 NR Description: HMG-CoA synthase [Brassica juncea]
  misc_feature (5)..(464): NCBI GI NO: 15234313 NR Description: hydroxymethylglutaryl-CoA synthase
  misc_feature (5)..(464): NCBI GI NO: 1143390 NR Description: hydroxymethylglutaryl-CoA synthase
  misc_feature (5)..(463): NCBI GI NO: 11192007 NR Description: HMG-CoA synthase [Brassica juncea]
  misc_feature (1)..(463): NCBI GI NO: 7436678 NR Description: hydroxymethylglutaryl-CoA synthase (EC 4
  misc_feature (59)..(464): NCBI GI NO: 30681902 NR Description: hydroxymethylglutaryl-CoA synthase
MASEAKDVGILAMDIYFPPNCVLQEELETHDGVSKGKYTIGLGQESMAFCTEVEDVISMSLTVVKSLLKNYNIDPMCIGRLEVGSETVIDKSKSIKTWLMQIFEESGNTDIEGVDSSNACYGGTAALFNCVNWVESKSWDGRYGLVVCTDSAVYAEGPARPTGGAAAIAMLIGPNAPICFESKYRGSHMAHVYDFYKPDLASEYPVVDGKLSQTCYLMALDSCYNVFCKKYEKHEGKQFSISDADYVVFHSPYNKLVQKSFARLYYNDFLRNCSTVDGESREKLAPYAGLSSEESYQSRDLEKASQQVAKNLYETKVQPTTLIPKQVGNMYTASLYAALASVVHSRHETLAGQRIVMFSYGSGLTSTMFSFMINEGHHPFSLLNIANILDISKKLKARHVVPPEKFVEALKLMEHRYGARDFVTNQDTSLLSAGTYYLTHVDSKYRRFYDVKGDGVATAMSNGH

SEQ ID NO: 41513 - protein, 452 aa, Zea mays subsp. mays
  peptide (1)..(452): Ceres Seq. ID no. 12378254
  misc_feature (1)..(440): Pfam Name: Pfam Description:  Hydroxymethylglutaryl-coenzyme A synthase
  misc_feature (1)..(452): NCBI GI NO: 16417956 NR Description: hydroxymethylglutaryl coenzyme A synthase
  misc_feature (1)..(452): NCBI GI NO: 14916100 NR Description: hydroxymethylglutaryl coenzyme A synthase
  misc_feature (1)..(452): NCBI GI NO: 11192005 NR Description: HMG-CoA synthase [Brassica juncea]
  misc_feature (1)..(452): NCBI GI NO: 7799986 NR Description: HMG-CoA synthase [Brassica juncea]
  misc_feature (1)..(452): NCBI GI NO: 11192003 NR Description: HMG-CoA synthase [Brassica juncea]
  misc_feature (1)..(452): NCBI GI NO: 15234313 NR Description: hydroxymethylglutaryl-CoA synthase
  misc_feature (1)..(452): NCBI GI NO: 1143390 NR Description: hydroxymethylglutaryl-CoA synthase
  misc_feature (1)..(451): NCBI GI NO: 11192007 NR Description: HMG-CoA synthase [Brassica juncea]
  misc_feature (1)..(451): NCBI GI NO: 7436678 NR Description: hydroxymethylglutaryl-CoA synthase (EC 4
  misc_feature (47)..(452): NCBI GI NO: 30681902 NR Description: hydroxymethylglutaryl-CoA synthase
MDIYFPPNCVLQEELETHDGVSKGKYTIGLGQESMAFCTEVEDVISMSLTVVKSLLKNYNIDPMCIGRLEVGSETVIDKSKSIKTWLMQIFEESGNTDIEGVDSSNACYGGTAALFNCVNWVESKSWDGRYGLVVCTDSAVYAEGPARPTGGAAAIAMLIGPNAPICFESKYRGSHMAHVYDFYKPDLASEYPVVDGKLSQTCYLMALDSCYNVFCKKYEKHEGKQFSISDADYVVFHSPYNKLVQKSFARLYYNDFLRNCSTVDGESREKLAPYAGLSSEESYQSRDLEKASQQVAKNLYETKVQPTTLIPKQVGNMYTASLYAALASVVHSRHETLAGQRIVMFSYGSGLTSTMFSFMINEGHHPFSLLNIANILDISKKLKARHVVPPEKFVEALKLMEHRYGARDFVTNQDTSLLSAGTYYLTHVDSKYRRFYDVKGDGVATAMSNGH

SEQ ID NO: 41514 - protein, 418 aa, Zea mays subsp. mays
  peptide (1)..(418): Ceres Seq. ID no. 12378255
  misc_feature (1)..(406): Pfam Name: Pfam Description:  Hydroxymethylglutaryl-coenzyme A synthase
  misc_feature (1)..(418): NCBI GI NO: 16417956 NR Description: hydroxymethylglutaryl coenzyme A synthase
  misc_feature (1)..(418): NCBI GI NO: 14916100 NR Description: hydroxymethylglutaryl coenzyme A synthase
  misc_feature (1)..(418): NCBI GI NO: 11192005 NR Description: HMG-CoA synthase [Brassica juncea]
  misc_feature (1)..(418): NCBI GI NO: 7799986 NR Description: HMG-CoA synthase [Brassica juncea]
  misc_feature (1)..(418): NCBI GI NO: 11192003 NR Description: HMG-CoA synthase [Brassica juncea]
  misc_feature (1)..(418): NCBI GI NO: 15234313 NR Description: hydroxymethylglutaryl-CoA synthase
  misc_feature (1)..(418): NCBI GI NO: 1143390 NR Description: hydroxymethylglutaryl-CoA synthase
  misc_feature (1)..(417): NCBI GI NO: 11192007 NR Description: HMG-CoA synthase [Brassica juncea]
  misc_feature (1)..(417): NCBI GI NO: 7436678 NR Description: hydroxymethylglutaryl-CoA synthase (EC 4
  misc_feature (13)..(418): NCBI GI NO: 30681902 NR Description: hydroxymethylglutaryl-CoA synthase
MAFCTEVEDVISMSLTVVKSLLKNYNIDPMCIGRLEVGSETVIDKSKSIKTWLMQIFEESGNTDIEGVDSSNACYGGTAALFNCVNWVESKSWDGRYGLVVCTDSAVYAEGPARPTGGAAAIAMLIGPNAPICFESKYRGSHMAHVYDFYKPDLASEYPVVDGKLSQTCYLMALDSCYNVFCKKYEKHEGKQFSISDADYVVFHSPYNKLVQKSFARLYYNDFLRNCSTVDGESREKLAPYAGLSSEESYQSRDLEKASQQVAKNLYETKVQPTTLIPKQVGNMYTASLYAALASVVHSRHETLAGQRIVMFSYGSGLTSTMFSFMINEGHHPFSLLNIANILDISKKLKARHVVPPEKFVEALKLMEHRYGARDFVTNQDTSLLSAGTYYLTHVDSKYRRFYDVKGDGVATAMSNGH

SEQ ID NO: 41515 - DNA, 484 bp, Zea mays subsp. mays
  misc_feature (1)..(484): Ceres Seq. ID no. 4613578
gctccagtctagacggcggtttgacttttcgaccggggaaataggcgctgcgtttgatttgaggaggcgacacgagacgggacgggagggatctcttcgctggaggctggagcgttgcccgattcgtcgcggttctcggacaagggaggagggagggcgcacctcgggctccgatcgaagagctttgttaacattagagattgaaaggtagcatcgtagcaaaatgaaggcaccatcactactggttcagtgtttccctggcttgcttcccagcaaggccactagttgcgtgccaattgtatctgagaaggatctgcagctaccatcaccagctgttgaaataatcccctcaaagagtgttcatccatacaaatatgctggagagaaggttgatgtgcaaggtcttaatattttcaagggtaaagtcagtgtagcagatatgatagttatctcaccttctgaagtagcatcatcaaaatatgat

SEQ ID NO: 41516 - protein, 87 aa, Zea mays subsp. mays
  peptide (1)..(87): Ceres Seq. ID no. 4613579
  misc_feature (1)..(86): NCBI GI NO: 38346224 NR Description: OJ990528_30.4
  misc_feature (1)..(85): NCBI GI NO: 16226903 NR Description: At2g43320/T1O24.6 [Arabidopsis thaliana]
  misc_feature (1)..(85): NCBI GI NO: 18406207 NR Description: expressed protein; protein id: At2g43320
  misc_feature (1)..(85): NCBI GI NO: 25408858 NR Description: hypothetical protein At2g43320
MKAPSLLVQCFPGLLPSKATSCVPIVSEKDLQLPSPAVEIIPSKSVHPYKYAGEKVDVQGLNIFKGKVSVADMIVISPSEVASSKYD

SEQ ID NO: 41517 - protein, 69 aa, Zea mays subsp. mays
  peptide (1)..(69): Ceres Seq. ID no. 4613580
LQSRRRFDFSTGEIGAAFDLRRRHETGREGSLRWRLERCPIRRGSRTREEGGRTSGSDRRALLTLEIER

SEQ ID NO: 41518 - DNA, 1692 bp, Zea mays subsp. mays
  misc_feature (1)..(1692): Ceres Seq. ID no. 12383532
gcacgagaccattacctagaacatcctaatcgaaaagccgccgccgcaaacgtcgcccccgaccgaagcctagccaccaccaccagcaccagcaacctcgcgtagcagcgctcgacaccgctggacgccccgcgcccgcgcgaaagcaggaccttgattctgtcgttggcgataccatggatgtgtcctacgagaagtgtgctgatccgtcgaactcggacctgcctagcgctgttgttgatggctgagcgatacgacgatggcggctccgaacacctgggatctgctgtagtagagggagctattggaaacgaagggaattcggggaccgaaagttccgagcagactggtgatgagcgcgctggaggaggtgaaggctctcctgttgatgtcgaaaacagcgctgataaacaagagagccaggagacgacggttccgatggaagaaacagaaacgagcgacggcacctcgatcacgtcgatggaggatgccctggaaccgaaccgtcatcacgatctcccgtcggagcctgaggatgtgggcaaccacactcctgatcctgatcactccagcggcaagaactccaaaggaaacagtagcgtgttccagagcgcaaggagggtgctggcttcaaccaataagaaaactccatctgcaactgcacggaagccactgcagttgactaacagaggtaaccaggatgacgcgaaatcgtcggctggaaaggccgccacggttccatcaggcccggttttccgctgtactgaacgggccgagaagcgcagagaattttatatgaagctggaggagaagcatcaagctatggaggaagagaagattcagttggaggctaagttgaagaaagagcaggaggaggcactgaagcagctgaggaagagcctgaccttcaaagccaaccccatgccgagcttctaccacgaggcgacgccgtccccgaaggccgagttcaagaagctgcccacgacccggcccaagtcgcccaagctgggcaggaggaagacggcctcgacctccatggagacgtccaactcgtcgtcggagagcgagggcacgaggccgtgctgccgcgccagccgcgacggcctcgacagcagctgcagatgcggcggcaggagcaggccgcaggccgcgaacgccaagccggccgccgggcccaagaagccgccgccgcagcagcagcagccgaaacaccgcgcccacaagatcgccggcgagggcgccatcaacatcgccgtgcactagccgccgccgccgcttcttgaaacttctttccggtcgcatgcatgcaggacgatggcgatggcgtgcggattttccttctaagttatgagagtgctttgtcggcttgtggatttggtgtagataataatataagttatggtgacgacgaacgaacaggggctgctgccacgagtgaggccggtcagtcagacagaggtggtggtgtttattgcttgcttgcttgtttgtctgtttgtttgtttatttatgctaatcttatttatttaatctgctgtcgaggatggcctgcgcattgccactgtgcaggcgctgcttgttttttcgtcttcttaatttatggggagtggtaagagagacttgagcgctggatgtaacgtgtacaaacgaaaacgaaggcttgctggtggtggtgatggaggattttatctg

SEQ ID NO: 41519 - protein, 360 aa, Zea mays subsp. mays
  peptide (1)..(360): Ceres Seq. ID no. 12383533
  misc_feature (28)..(359): NCBI GI NO: 34393229 NR Description: putative seed specific protein
  misc_feature (45)..(348): NCBI GI NO: 18417986 NR Description: putative protein; protein id: At4g32330
  misc_feature (34)..(348): NCBI GI NO: 15224733 NR Description: unknown protein; protein id: At2g25480.1
  misc_feature (63)..(290): NCBI GI NO: 6175167 NR Description: unknown protein [Arabidopsis thaliana]
  misc_feature (63)..(290): NCBI GI NO: 21618286 NR Description: unknown [Arabidopsis thaliana]
  misc_feature (63)..(290): NCBI GI NO: 18396961 NR Description: expressed protein; protein id: At3g04630
  misc_feature (177)..(283): NCBI GI NO: 18403980 NR Description: expressed protein; protein id: At2g35880
  misc_feature (177)..(283): NCBI GI NO: 25408425 NR Description: hypothetical protein At2g35880
  misc_feature (121)..(293): NCBI GI NO: 34897180 NR Description: unknown protein
  misc_feature (63)..(290): NCBI GI NO: 30679219 NR Description: expressed protein [Arabidopsis thaliana]
MCPTRSVLIRRTRTCLALLLMAERYDDGGSEHLGSAVVEGAIGNEGNSGTESSEQTGDERAGGGEGSPVDVENSADKQESQETTVPMEETETSDGTSITSMEDALEPNRHHDLPSEPEDVGNHTPDPDHSSGKNSKGNSSVFQSARRVLASTNKKTPSATARKPLQLTNRGNQDDAKSSAGKAATVPSGPVFRCTERAEKRREFYMKLEEKHQAMEEEKIQLEAKLKKEQEEALKQLRKSLTFKANPMPSFYHEATPSPKAEFKKLPTTRPKSPKLGRRKTASTSMETSNSSSESEGTRPCCRASRDGLDSSCRCGGRSRPQAANAKPAAGPKKPPPQQQQPKHRAHKIAGEGAINIAVH

SEQ ID NO: 41520 - protein, 340 aa, Zea mays subsp. mays
  peptide (1)..(340): Ceres Seq. ID no. 12383534
  misc_feature (8)..(339): NCBI GI NO: 34393229 NR Description: putative seed specific protein
  misc_feature (25)..(328): NCBI GI NO: 18417986 NR Description: putative protein; protein id: At4g32330
  misc_feature (14)..(328): NCBI GI NO: 15224733 NR Description: unknown protein; protein id: At2g25480.1
  misc_feature (43)..(270): NCBI GI NO: 6175167 NR Description: unknown protein [Arabidopsis thaliana]
  misc_feature (43)..(270): NCBI GI NO: 18396961 NR Description: expressed protein; protein id: At3g04630
  misc_feature (43)..(270): NCBI GI NO: 21618286 NR Description: unknown [Arabidopsis thaliana]
  misc_feature (157)..(263): NCBI GI NO: 18403980 NR Description: expressed protein; protein id: At2g35880
  misc_feature (157)..(263): NCBI GI NO: 25408425 NR Description: hypothetical protein At2g35880
  misc_feature (101)..(273): NCBI GI NO: 34897180 NR Description: unknown protein
  misc_feature (43)..(270): NCBI GI NO: 30679219 NR Description: expressed protein [Arabidopsis thaliana]
MAERYDDGGSEHLGSAVVEGAIGNEGNSGTESSEQTGDERAGGGEGSPVDVENSADKQESQETTVPMEETETSDGTSITSMEDALEPNRHHDLPSEPEDVGNHTPDPDHSSGKNSKGNSSVFQSARRVLASTNKKTPSATARKPLQLTNRGNQDDAKSSAGKAATVPSGPVFRCTERAEKRREFYMKLEEKHQAMEEEKIQLEAKLKKEQEEALKQLRKSLTFKANPMPSFYHEATPSPKAEFKKLPTTRPKSPKLGRRKTASTSMETSNSSSESEGTRPCCRASRDGLDSSCRCGGRSRPQAANAKPAAGPKKPPPQQQQPKHRAHKIAGEGAINIAVH

SEQ ID NO: 41521 - protein, 274 aa, Zea mays subsp. mays
  peptide (1)..(274): Ceres Seq. ID no. 12383535
  misc_feature (1)..(273): NCBI GI NO: 34393229 NR Description: putative seed specific protein
  misc_feature (1)..(262): NCBI GI NO: 18417986 NR Description: putative protein; protein id: At4g32330
  misc_feature (1)..(262): NCBI GI NO: 15224733 NR Description: unknown protein; protein id: At2g25480.1
  misc_feature (1)..(204): NCBI GI NO: 6175167 NR Description: unknown protein [Arabidopsis thaliana]
  misc_feature (1)..(204): NCBI GI NO: 18396961 NR Description: expressed protein; protein id: At3g04630
  misc_feature (1)..(204): NCBI GI NO: 21618286 NR Description: unknown [Arabidopsis thaliana]
  misc_feature (91)..(197): NCBI GI NO: 18403980 NR Description: expressed protein; protein id: At2g35880
  misc_feature (91)..(197): NCBI GI NO: 25408425 NR Description: hypothetical protein At2g35880
  misc_feature (35)..(207): NCBI GI NO: 34897180 NR Description: unknown protein
  misc_feature (1)..(204): NCBI GI NO: 30679219 NR Description: expressed protein [Arabidopsis thaliana]
MEETETSDGTSITSMEDALEPNRHHDLPSEPEDVGNHTPDPDHSSGKNSKGNSSVFQSARRVLASTNKKTPSATARKPLQLTNRGNQDDAKSSAGKAATVPSGPVFRCTERAEKRREFYMKLEEKHQAMEEEKIQLEAKLKKEQEEALKQLRKSLTFKANPMPSFYHEATPSPKAEFKKLPTTRPKSPKLGRRKTASTSMETSNSSSESEGTRPCCRASRDGLDSSCRCGGRSRPQAANAKPAAGPKKPPPQQQQPKHRAHKIAGEGAINIAVH

SEQ ID NO: 41522 - DNA, 466 bp, Zea mays subsp. mays
  misc_feature (1)..(466): Ceres Seq. ID no. 6410186
atccatccgtagcgttccattccattccatctccctcctcgcctacggcttcttccaccgcggcatcgtgcccggcctctgcttcggcgcgggcctggggattacgctgttcggcatggcctacatgttcgtccacgacggcctggtccaccgccgctttccggtcggccccatcgccgacgtgccctacttccgccgagtggctgcctcgcacaagatacaccacatggacaagttcggcggcgtcccgtatgggctcttcctgggaccaaaggagctggaggaggttggtggcctggacgagcttgttagcagtccggtgagtgaagctactgatactgaagacgcaggagaagaaaagacgcgtccagttgtatgcgttgtccgaacaagcgtgttcatgggccagagtgtgccaaatgagttctagctttaggcgagtgggccaaatgagtgtgggctgcgt

SEQ ID NO: 41523 - protein, 142 aa, Zea mays subsp. mays
  peptide (1)..(142): Ceres Seq. ID no. 6410187
  misc_feature (2)..(102): Pfam Name: Pfam Description:  Carotene hydroxylase
  misc_feature (4)..(102): NCBI GI NO: 32488500 NR Description: OSJNBa0011J08.7
  misc_feature (2)..(102): NCBI GI NO: 9988836 NR Description: beta-carotene hydroxylase [Citrus unshiu]
  misc_feature (2)..(102): NCBI GI NO: 11245486 NR Description: beta-carotene hydroxylase [Citrus unshiu]
  misc_feature (2)..(102): NCBI GI NO: 9968545 NR Description: beta-carotene hydroxylase
  misc_feature (4)..(102): NCBI GI NO: 5870600 NR Description: beta-carotene hydroxylase
  misc_feature (2)..(121): NCBI GI NO: 33145986 NR Description: beta-carotene hydroxylase [Crocus sativus]
  misc_feature (2)..(102): NCBI GI NO: 2956717 NR Description: beta-carotene hydroxylase 2 [Capsicum annuum]
  misc_feature (9)..(102): NCBI GI NO: 37536402 NR Description: putative beta-carotene hydroxylase
  misc_feature (4)..(102): NCBI GI NO: 9971820 NR Description: beta hydroxylase [Tagetes erecta]
  misc_feature (2)..(116): NCBI GI NO: 21734857 NR Description: beta-carotene hydroxylase [Vitis vinifera]
SIRSVPFHSISLLAYGFFHRGIVPGLCFGAGLGITLFGMAYMFVHDGLVHRRFPVGPIADVPYFRRVAASHKIHHMDKFGGVPYGLFLGPKELEEVGGLDELVSSPVSEATDTEDAGEEKTRPVVCVVRTSVFMGQSVPNEF

SEQ ID NO: 41524 - protein, 106 aa, Zea mays subsp. mays
  peptide (1)..(106): Ceres Seq. ID no. 6410188
PSVAFHSIPSPSSPTASSTAASCPASASARAWGLRCSAWPTCSSTTAWSTAAFRSAPSPTCPTSAEWLPRTRYTTWTSSAASRMGSSWDQRSWRRLVAWTSLLAVR

SEQ ID NO: 41525 - protein, 104 aa, Zea mays subsp. mays; identical to SEQ ID NO: 36499
  peptide (1)..(104): Ceres Seq. ID no. 6410189
  misc_feature (1)..(64): Pfam Name: Pfam Description:  Carotene hydroxylase
  misc_feature (1)..(64): NCBI GI NO: 32488500 NR Description: OSJNBa0011J08.7
  misc_feature (1)..(64): NCBI GI NO: 9988836 NR Description: beta-carotene hydroxylase [Citrus unshiu]
  misc_feature (1)..(64): NCBI GI NO: 11245486 NR Description: beta-carotene hydroxylase [Citrus unshiu]
  misc_feature (1)..(64): NCBI GI NO: 9968545 NR Description: beta-carotene hydroxylase
  misc_feature (1)..(64): NCBI GI NO: 5870600 NR Description: beta-carotene hydroxylase
  misc_feature (1)..(83): NCBI GI NO: 33145986 NR Description: beta-carotene hydroxylase [Crocus sativus]
  misc_feature (1)..(64): NCBI GI NO: 2956717 NR Description: beta-carotene hydroxylase 2 [Capsicum annuum]
  misc_feature (1)..(64): NCBI GI NO: 37536402 NR Description: putative beta-carotene hydroxylase
  misc_feature (1)..(64): NCBI GI NO: 9971820 NR Description: beta hydroxylase [Tagetes erecta]
  misc_feature (1)..(78): NCBI GI NO: 21734857 NR Description: beta-carotene hydroxylase [Vitis vinifera]

SEQ ID NO: 41526 - DNA, 468 bp, Zea mays subsp. mays
  misc_feature (1)..(468): Ceres Seq. ID no. 2112893
ctttctcgcttgctcactcgcgtcgacgactgggctaccggcgcctccacccttcggcctgggtkgttctttsgccggtcgacgagcgcacaccagggtacagtacgtattgctcgtgatttgtgtaactacggagcaagctgcatacagcacaagatagaagatgggtatccttgagaggatcaaggagattgaggccgagatggctcggactcagaaaaataaagcaacagaatatcatcttggacaactgaaggcaaaactagcaaagttgaggacacaactattagagcctccaaagggttccagcggaggtggagatggttttgaagtcacaaagtttgggcatggtcgtgttgctcttattggatttcccagtgttggaaagtcaactcttttaacgatgttgactgggacacattctgaagctgcatcatatgagttcacaacgcttacttgcattcctgg

SEQ ID NO: 41527 - protein, 101 aa, Zea mays subsp. mays
  peptide (1)..(101): Ceres Seq. ID no. 2112894
  misc_feature (1)..(100): Pfam Name: Pfam Description:  GTP1/OBG family
  misc_feature (1)..(100): NCBI GI NO: 15218561 NR Description: putative GTP-binding protein; protein id:At1g72660
  misc_feature (1)..(100): NCBI GI NO: 2058456 NR Description: GTP-binding protein [Arabidopsis thaliana]
  misc_feature (1)..(100): NCBI GI NO: 15220113 NR Description: developmentally regulated GTP-binding protein
  misc_feature (1)..(100): NCBI GI NO: 8778457 NR Description: F1L3.17 [Arabidopsis thaliana]
  misc_feature (1)..(100): NCBI GI NO: 7441590 NR Description: GTP binding protein - garden pea
  misc_feature (1)..(100): NCBI GI NO: 13877991 NR Description: putative developmentally regulated GTP-bindingprotein
  misc_feature (1)..(100): NCBI GI NO: 4557537 NR Description: developmentally regulated GTP binding protein 2
  misc_feature (1)..(100): NCBI GI NO: 10946678 NR Description: developmentally regulated GTP binding protein 2
  misc_feature (1)..(100): NCBI GI NO: 12653443 NR Description: developmentally regulated GTP-binding protein 2
  misc_feature (1)..(100): NCBI GI NO: 30584259 NR Description: Homo sapiens developmentally regulated GTP binding protein 2
MGILERIKEIEAEMARTQKNKATEYHLGQLKAKLAKLRTQLLEPPKGSSGGGDGFEVTKFGHGRVALIGFPSVGKSTLLTMLTGTHSEAASYEFTTLTCIP

SEQ ID NO: 41528 - protein, 88 aa, Zea mays subsp. mays
  peptide (1)..(88): Ceres Seq. ID no. 2112895
  misc_feature (1)..(87): Pfam Name: Pfam Description:  GTP1/OBG family
  misc_feature (1)..(87): NCBI GI NO: 15218561 NR Description: putative GTP-binding protein; protein id:At1g72660
  misc_feature (1)..(87): NCBI GI NO: 2058456 NR Description: GTP-binding protein [Arabidopsis thaliana]
  misc_feature (1)..(87): NCBI GI NO: 15220113 NR Description: developmentally regulated GTP-binding protein
  misc_feature (1)..(87): NCBI GI NO: 8778457 NR Description: F1L3.17 [Arabidopsis thaliana]
  misc_feature (1)..(87): NCBI GI NO: 7441590 NR Description: GTP binding protein - garden pea
  misc_feature (1)..(87): NCBI GI NO: 13877991 NR Description: putative developmentally regulated GTP-bindingprotein
  misc_feature (1)..(87): NCBI GI NO: 4557537 NR Description: developmentally regulated GTP binding protein 2
  misc_feature (1)..(87): NCBI GI NO: 10946678 NR Description: developmentally regulated GTP binding protein 2
  misc_feature (1)..(87): NCBI GI NO: 12653443 NR Description: developmentally regulated GTP-binding protein 2
  misc_feature (1)..(87): NCBI GI NO: 30584259 NR Description: Homo sapiens developmentally regulated GTP binding protein 2
MARTQKNKATEYHLGQLKAKLAKLRTQLLEPPKGSSGGGDGFEVTKFGHGRVALIGFPSVGKSTLLTMLTGTHSEAASYEFTTLTCIP

SEQ ID NO: 41529 - protein, 58 aa, Zea mays subsp. mays
  peptide (1)..(58): Ceres Seq. ID no. 2112896
  misc_feature (22)..(22): Xaa is any aa, unknown or other
  misc_feature (25)..(25): Xaa is any aa, unknown or other
LSRLLTRVDDWATGASTLRPGXFFXRSTSAHQGTVRIARDLCNYGASCIQHKIEDGYP

SEQ ID NO: 41530 - DNA, 1829 bp, Zea mays subsp. mays
  misc_feature (1)..(1829): Ceres Seq. ID no. 12435597
aacgtgcgggactggtctctcccgaataagttgtcacccacacagggcacagcttggagttttcctgattgcattaccctgtccaaactgttcttgccaggaacattattcctcctcgtgttccatcttctaaacaaactgcatcctgccatgattcgatgatcgacctcatgtcgctagcactgccctggccagcagaccggcacggcgatgcgatcggtgcacagagcggtggcgcgagtggtggtgtgggttgcggcgccggcgatgatccgcgcggggctgacgacgccggtgatgacggtgctgctggtgtcgttcctgctggagtacctgcccaagatctaccacgcggcgcgcctgctccggcggatgcagaggcagtctggctacatcttcggcaccatctggtggggcatcgcgctcaacctcatggcctacttcgtcgccgcccatgctgtgggcgcgtgctggtacctgctcggcgtccagcgggccagcaagtgcctgaaagagcagtgcctccaggcggctgggtgcgcgcgcggcagcgcggtggcctgcgcggcgccgctgtactacggcggctccccgtctcccggagtcgtcggcggcgacaggctcgcctgggccgggaacgcgcaggcccggggcacgtgcctcgccagcggcgacaactaccagtacggcgcgtacacgtggacggtgatgctggtggcgaacccgagccgggtggagcggatgctgctccccatcttctggggcctcatgacgctcagcacgttcggcaacctggagagcacgacggagtggctggagatcgtgttcaacatcatcaccatcacgggcgggctcgtcctcgtcaccatgctcatcggcaacatcaaggtgttcctgaacgcgaccacgtccaagaagcaggccatgcacacgcggctgcgcggcgtggagtggtggatgaagcgcaagaaactgccgcggagcttccgcggccgggtgcgccagttcgagcgccagcggtgggccgccacgcgcggcgtcgacgagtgccaaatcgtgcgcgacctccccgagggcctccgccgggacatcaagtaccacctctgcctcgacctcgtccgccaggtcccattcttccagcacatggacgacctcgtgctcgagaacatctgcgacagggtgaaatccctcatctttcccaagggagaaaccatcgtgagggagggcgacgtggtgcagcggatgctgttcatcgtgcggggccacctgcagtgcagccaggtgctgcggaacggcgcgacgagcagctgcacgctggggcctggcaacttcagcggcgacgagctgctgtcgtggtgcctgcgccgcccgttcctggaacgcctcccgacgtcgtcggcgacgctggtgacgctggagagcaccgaggtgttcggcctggacgccgccgacgtcaagtacgtcacgcagcacttccgctacaccttcaccaacgacaaggtgcgccgcagcgcgcgctactactcgcccggctggcgtacctgggcggccgtcgcccgttcagctggcctggaggaggtacaagcaccgcaagacgctctcatcgctctccttcatccgcccgcggcgcccgctgtcccgctgctcctcgctcggggaggagaagctccgcctgtacacggccatcctcacctcgcccaagcccaaccaggacgacgacttctagctagcttatagctaggccgttccaggccggattctcttctcctcagcgaggaggagtatatatatcaaacaacatgcatttattagtagtattcattactctc

SEQ ID NO: 41531 - protein, 523 aa, Zea mays subsp. mays
  peptide (1)..(523): Ceres Seq. ID no. 12435598
  misc_feature (17)..(75): NCBI GI NO: 15228479 NR Description: histone-H4-like protein; protein id: At3g28780.1
MIDLMSLALPWPADRHGDAIGAQSGGASGGVGCGAGDDPRGADDAGDDGAAGVVPAGVPAQDLPRGAPAPADAEAVWLHLRHHLVGHRAQPHGLLRRRPCCGRVLVPARRPAGQQVPERAVPPGGWVRARQRGGLRGAAVLRRLPVSRSRRRRQARLGRERAGPGHVPRQRRQLPVRRVHVDGDAGGEPEPGGADAAPHLLGPHDAQHVRQPGEHDGVAGDRVQHHHHHGRARPRHHAHRQHQGVPERDHVQEAGHAHAAARRGVVDEAQETAAELPRPGAPVRAPAVGRHARRRRVPNRARPPRGPPPGHQVPPLPRPRPPGPILPAHGRPRAREHLRQGEIPHLSQGRNHREGGRRGAADAVHRAGPPAVQPGAAERRDEQLHAGAWQLQRRRAAVVVPAPPVPGTPPDVVGDAGDAGEHRGVRPGRRRRQVRHAALPLHLHQRQGAPQRALLLARLAYLGGRRPFSWPGGGTSTARRSHRSPSSARGARCPAAPRSGRRSSACTRPSSPRPSPTRTTTSS

SEQ ID NO: 41532 - protein, 519 aa, Zea mays subsp. mays
  peptide (1)..(519): Ceres Seq. ID no. 12435599
  misc_feature (13)..(71): NCBI GI NO: 15228479 NR Description: histone-H4-like protein; protein id: At3g28780.1
MSLALPWPADRHGDAIGAQSGGASGGVGCGAGDDPRGADDAGDDGAAGVVPAGVPAQDLPRGAPAPADAEAVWLHLRHHLVGHRAQPHGLLRRRPCCGRVLVPARRPAGQQVPERAVPPGGWVRARQRGGLRGAAVLRRLPVSRSRRRRQARLGRERAGPGHVPRQRRQLPVRRVHVDGDAGGEPEPGGADAAPHLLGPHDAQHVRQPGEHDGVAGDRVQHHHHHGRARPRHHAHRQHQGVPERDHVQEAGHAHAAARRGVVDEAQETAAELPRPGAPVRAPAVGRHARRRRVPNRARPPRGPPPGHQVPPLPRPRPPGPILPAHGRPRAREHLRQGEIPHLSQGRNHREGGRRGAADAVHRAGPPAVQPGAAERRDEQLHAGAWQLQRRRAAVVVPAPPVPGTPPDVVGDAGDAGEHRGVRPGRRRRQVRHAALPLHLHQRQGAPQRALLLARLAYLGGRRPFSWPGGGTSTARRSHRSPSSARGARCPAAPRSGRRSSACTRPSSPRPSPTRTTTSS

SEQ ID NO: 41533 - protein, 508 aa, Zea mays subsp. mays
  peptide (1)..(508): Ceres Seq. ID no. 12435600
  misc_feature (323)..(424): Pfam Name: Pfam Description:  Cyclic nucleotide-binding domain
  misc_feature (8)..(449): NCBI GI NO: 34910098 NR Description: putative cyclic nucleotide and calmodulin-regulatedion channel
  misc_feature (8)..(449): NCBI GI NO: 30961805 NR Description: putative cyclic nucleotide and calmodulin-regulatedion channel protein
  misc_feature (10)..(449): NCBI GI NO: 15239581 NR Description: cyclic nucleotide-regulated ion channel
  misc_feature (8)..(448): NCBI GI NO: 15242291 NR Description: cyclic nucleotide-regulated ion channel
  misc_feature (8)..(473): NCBI GI NO: 13236666 NR Description: putative cyclic nucleotide and calmodulin-regulatedion channel protein
  misc_feature (89)..(477): NCBI GI NO: 30961811 NR Description: putative cyclic nucleotide and calmodulin-regulatedion channel protein
  misc_feature (10)..(447): NCBI GI NO: 25412226 NR Description: hypothetical protein At2g24610
  misc_feature (10)..(447): NCBI GI NO: 30682497 NR Description: cyclic nucleotide-regulated ion channel, putative
  misc_feature (38)..(447): NCBI GI NO: 30688654 NR Description: cyclic nucleotide-regulated ion channel, putative
  misc_feature (10)..(447): NCBI GI NO: 15226370 NR Description: cyclic nucleotide-regulated ion channel, putative
MRSVHRAVARVVVWVAAPAMIRAGLTTPVMTVLLVSFLLEYLPKIYHAARLLRRMQRQSGYIFGTIWWGIALNLMAYFVAAHAVGACWYLLGVQRASKCLKEQCLQAAGCARGSAVACAAPLYYGGSPSPGVVGGDRLAWAGNAQARGTCLASGDNYQYGAYTWTVMLVANPSRVERMLLPIFWGLMTLSTFGNLESTTEWLEIVFNIITITGGLVLVTMLIGNIKVFLNATTSKKQAMHTRLRGVEWWMKRKKLPRSFRGRVRQFERQRWAATRGVDECQIVRDLPEGLRRDIKYHLCLDLVRQVPFFQHMDDLVLENICDRVKSLIFPKGETIVREGDVVQRMLFIVRGHLQCSQVLRNGATSSCTLGPGNFSGDELLSWCLRRPFLERLPTSSATLVTLESTEVFGLDAADVKYVTQHFRYTFTNDKVRRSARYYSPGWRTWAAVARSAGLEEVQAPQDALIALLHPPAAPAVPLLLARGGEAPPVHGHPHLAQAQPGRRLLASL

SEQ ID NO: 41534 - DNA, 1557 bp, Zea mays subsp. mays
  misc_feature (1)..(1557): Ceres Seq. ID no. 12418577
gcacgagaccattacctagaacatcctaatcgaaaaatgaacaatttggcgctctcgatgctctcgccgtcgacctcaggtttcccgccaagtcccctaccctccaaggccgccacgaacgccacagctacccgatgccgcgccgcgccctcgggagacgcctcgctgtgcgccttccgcgcgcaccacagcgccggccacgccctccacactaacccgtctctgatgcccgcgctcgccgcctgcgcgcggctgccctccgccgtggccgaggccgagcagatccacgcactcctcgtcaagtcaggcggctcgcgggctgtctcccacgtccaagccttcacgtccctgattcgcgcctacgcgaggctcggccgcgtgtgcgacgcgcggaaggtgttcgatggaatggccgaccggacggtggtcacctggaacgtgctgcttgatgcgcttatcagagatggcgacttggacgctgcgtgggaggtgtttgtgaaaatgccgcagcgcaatgcggtttcttggaacaccataatttctggttttgcaaggaacgggtgggcgccggtggcagtggacttgtttatcgagatgactgtggcttatggtttagcgccagatgaggccacgatggttggcttcgtgtcggctgttcgggacattggtctacttgcaattgggaagagcgcacacgggtatgttctccgtcgggagttctcacttgatggtcctctcggggttgcactggtcagtatgtacacgaggtgcgggagcatgggtgctgcacacagttgcttcttaagtgtcaccaccaagaatgtggagcattggacctctttgatcgcaggtttcgcagcacatggtcaaccagagaatgccttgaggttgttcgtcgagatgaggcaggtgggcattgagcctaatggtgtcaccttcgtagccgtcttgagtgcctgcagccatggcgggctcgtcgatgagggcttcaagtacttcgacctaatgaggagcatgggcatcaggccgatgatccagcactatggctgcttggttgatctccttggccgtgctgggttcttgaaggaggctttcaatcttgccagcaatctacctgaagatcctggttttgtaatctggagctcgctactagcagcctgccgtagccatggcaacgtcgagatggcagagctcactgcgtcgaagttggcagaggcaaaaccaagtcatggcagctcgtatgtgctgctatcgaacacatatgcacgagcggaacaatgggaggactcgaagaggacgcggaggaggatggaggaacatagagtagccaagaaacctgggctcagctggatagagatagatggaagcgtacattcctttgccactgcagacaagctgcatatagaaagcgagggtatttatcatatgttggaggatttgaaacataatattacatcagctgcatatgaacctgaaccgttcgctatttctgaacaattgtaataaatttttctttggaggaagattatcacttgttaataaaaaatccatcatatc

SEQ ID NO: 41535 - protein, 500 aa, Zea mays subsp. mays
  peptide (1)..(500): Ceres Seq. ID no. 12418578
  misc_feature (346)..(380): Pfam Name: Pfam Description:  PPR repeat
  misc_feature (74)..(492): NCBI GI NO: 9279687 NR Description: gb|AAC35225
  misc_feature (74)..(492): NCBI GI NO: 15228829 NR Description: hypothetical protein; protein id: At3g22690.1
  misc_feature (64)..(492): NCBI GI NO: 15239979 NR Description: selenium-binding protein-like
  misc_feature (63)..(489): NCBI GI NO: 34902972 NR Description: unnamed protein product
  misc_feature (71)..(491): NCBI GI NO: 15239745 NR Description: selenium-binding protein-like
  misc_feature (33)..(481): NCBI GI NO: 38345581 NR Description: OSJNBa0027H06.17
  misc_feature (147)..(464): NCBI GI NO: 34912348 NR Description: P0518F01.9
  misc_feature (29)..(174): NCBI GI NO: 34912348 NR Description: P0518F01.9
  misc_feature (71)..(492): NCBI GI NO: 9294596 NR Description: gb|AAC35225
  misc_feature (71)..(492): NCBI GI NO: 15233234 NR Description: hypothetical protein; protein id: At3g15930.1
ARDHYLEHPNRKMNNLALSMLSPSTSGFPPSPLPSKAATNATATRCRAAPSGDASLCAFRAHHSAGHALHTNPSLMPALAACARLPSAVAEAEQIHALLVKSGGSRAVSHVQAFTSLIRAYARLGRVCDARKVFDGMADRTVVTWNVLLDALIRDGDLDAAWEVFVKMPQRNAVSWNTIISGFARNGWAPVAVDLFIEMTVAYGLAPDEATMVGFVSAVRDIGLLAIGKSAHGYVLRREFSLDGPLGVALVSMYTRCGSMGAAHSCFLSVTTKNVEHWTSLIAGFAAHGQPENALRLFVEMRQVGIEPNGVTFVAVLSACSHGGLVDEGFKYFDLMRSMGIRPMIQHYGCLVDLLGRAGFLKEAFNLASNLPEDPGFVIWSSLLAACRSHGNVEMAELTASKLAEAKPSHGSSYVLLSNTYARAEQWEDSKRTRRRMEEHRVAKKPGLSWIEIDGSVHSFATADKLHIESEGIYHMLEDLKHNITSAAYEPEPFAISEQL

SEQ ID NO: 41536 - protein, 488 aa, Zea mays subsp. mays
  peptide (1)..(488): Ceres Seq. ID no. 12418579
  misc_feature (334)..(368): Pfam Name: Pfam Description:  PPR repeat
  misc_feature (62)..(480): NCBI GI NO: 9279687 NR Description: gb|AAC35225
  misc_feature (62)..(480): NCBI GI NO: 15228829 NR Description: hypothetical protein; protein id: At3g22690.1
  misc_feature (52)..(480): NCBI GI NO: 15239979 NR Description: selenium-binding protein-like
  misc_feature (51)..(477): NCBI GI NO: 34902972 NR Description: unnamed protein product
  misc_feature (59)..(479): NCBI GI NO: 15239745 NR Description: selenium-binding protein-like
  misc_feature (21)..(469): NCBI GI NO: 38345581 NR Description: OSJNBa0027H06.17
  misc_feature (135)..(452): NCBI GI NO: 34912348 NR Description: P0518F01.9
  misc_feature (17)..(162): NCBI GI NO: 34912348 NR Description: P0518F01.9
  misc_feature (59)..(480): NCBI GI NO: 9294596 NR Description: gb|AAC35225
  misc_feature (59)..(480): NCBI GI NO: 15233234 NR Description: hypothetical protein; protein id: At3g15930.1
MNNLALSMLSPSTSGFPPSPLPSKAATNATATRCRAAPSGDASLCAFRAHHSAGHALHTNPSLMPALAACARLPSAVAEAEQIHALLVKSGGSRAVSHVQAFTSLIRAYARLGRVCDARKVFDGMADRTVVTWNVLLDALIRDGDLDAAWEVFVKMPQRNAVSWNTIISGFARNGWAPVAVDLFIEMTVAYGLAPDEATMVGFVSAVRDIGLLAIGKSAHGYVLRREFSLDGPLGVALVSMYTRCGSMGAAHSCFLSVTTKNVEHWTSLIAGFAAHGQPENALRLFVEMRQVGIEPNGVTFVAVLSACSHGGLVDEGFKYFDLMRSMGIRPMIQHYGCLVDLLGRAGFLKEAFNLASNLPEDPGFVIWSSLLAACRSHGNVEMAELTASKLAEAKPSHGSSYVLLSNTYARAEQWEDSKRTRRRMEEHRVAKKPGLSWIEIDGSVHSFATADKLHIESEGIYHMLEDLKHNITSAAYEPEPFAISEQL

SEQ ID NO: 41537 - protein, 481 aa, Zea mays subsp. mays
  peptide (1)..(481): Ceres Seq. ID no. 12418580
  misc_feature (327)..(361): Pfam Name: Pfam Description:  PPR repeat
  misc_feature (55)..(473): NCBI GI NO: 9279687 NR Description: gb|AAC35225
  misc_feature (55)..(473): NCBI GI NO: 15228829 NR Description: hypothetical protein; protein id: At3g22690.1
  misc_feature (45)..(473): NCBI GI NO: 15239979 NR Description: selenium-binding protein-like
  misc_feature (44)..(470): NCBI GI NO: 34902972 NR Description: unnamed protein product
  misc_feature (52)..(472): NCBI GI NO: 15239745 NR Description: selenium-binding protein-like
  misc_feature (14)..(462): NCBI GI NO: 38345581 NR Description: OSJNBa0027H06.17
  misc_feature (128)..(445): NCBI GI NO: 34912348 NR Description: P0518F01.9
  misc_feature (10)..(155): NCBI GI NO: 34912348 NR Description: P0518F01.9
  misc_feature (52)..(473): NCBI GI NO: 9294596 NR Description: gb|AAC35225
  misc_feature (52)..(473): NCBI GI NO: 15233234 NR Description: hypothetical protein; protein id: At3g15930.1
MLSPSTSGFPPSPLPSKAATNATATRCRAAPSGDASLCAFRAHHSAGHALHTNPSLMPALAACARLPSAVAEAEQIHALLVKSGGSRAVSHVQAFTSLIRAYARLGRVCDARKVFDGMADRTVVTWNVLLDALIRDGDLDAAWEVFVKMPQRNAVSWNTIISGFARNGWAPVAVDLFIEMTVAYGLAPDEATMVGFVSAVRDIGLLAIGKSAHGYVLRREFSLDGPLGVALVSMYTRCGSMGAAHSCFLSVTTKNVEHWTSLIAGFAAHGQPENALRLFVEMRQVGIEPNGVTFVAVLSACSHGGLVDEGFKYFDLMRSMGIRPMIQHYGCLVDLLGRAGFLKEAFNLASNLPEDPGFVIWSSLLAACRSHGNVEMAELTASKLAEAKPSHGSSYVLLSNTYARAEQWEDSKRTRRRMEEHRVAKKPGLSWIEIDGSVHSFATADKLHIESEGIYHMLEDLKHNITSAAYEPEPFAISEQL

SEQ ID NO: 41538 - DNA, 1463 bp, Zea mays subsp. mays
  misc_feature (1)..(1463): Ceres Seq. ID no. 12376728
gcacgagaccattacctagaacatcctaatcgaaaaaaccaaatgaatagccctgtgaatatataactgcgcccagaaaaccgtcgcaacgaccgcgtctcttgcgttctagtaggaagctagaatagcaggtagcgcctggtggccatggccacggcgtctgcagcttgtcatggcggggggatcgtgtactacaaggtccttccgatgagcatgttcctgctgctgctccgagggctcgtgcagccggtggcggccgcggcgtgctccgtggacgccatctacagcttcggcgactccatcgctgacacgggcaacctcctgcgcgagggccccgttggcttcttcgcctccatcggcagctacccgtacggccagaccctccgcaaacccacaggccgggtgctccgacggcctcctcatcatcgactacttcgcgatggcgctgaacctatcgctggtgagcccgtacctggacaagggagccgacttcgccagcggcgccaacttcgcggtggccggggccacggcgctggaccgggccgtgttgctgcagagcggcatcatggctccaccggcgagcgtgccgctcagctcccagctcgactggttcaaggcgcacctcaacgccaccgcctgcccctcgctacaagattgcgccaagaagctcgccggagcgctgttcttggtcggcgagatcggagggaacgactacaactacggcttcttacagggattcaggtcgatcgaggccatgaaggcctacgtgccacaggtcataaacgccataatggacgtcgccaaggaagtgatcgagctaggcgcgacccagatcgtgatcccggggaacttcccgatcgggtgctccccgagctacctctccctcttcgccgcgtccggcgacctcgacgaccggggctgcctcaggagctacaacgccttcgcccagcaccacaacgagcagctccaggcggccatcgacgggctgaggaaggccaacaccgacgtcaccgtcgtgtacgcggactactacggcgccttcatgcacctgctggaccatgcttcgctcctcgggttcgagcagggcgcgctcctgcaggcgtgctgcggggcgggcggcgcgtacaacttcaacatgaactcgatgtgcggcgcgccgggcacgacgacgtgcgcggacccggcgcgcaacgtcagctgggacggcatccacctcacgcagcaggcgtacagggccatcgcgctgtcccttctcatggaggggttcgcgcagccggatgacgccgtgcaagagatctggagctgctgacgtgcacccgttttggtttcattgggcctgtacctgctatcgatacgtatatatttttcctctagactagaattttgtacctgctattgatccatgtataggtgtttgcattgttcatatatataataataacgtgggaaattagaaatggttt

SEQ ID NO: 41539 - protein, 377 aa, Zea mays subsp. mays
  peptide (1)..(377): Ceres Seq. ID no. 12376729
  misc_feature (17)..(63): NCBI GI NO: 15237586 NR Description: lipase -like protein; protein id: At5g03980.1
  misc_feature (24)..(85): NCBI GI NO: 15218753 NR Description: lipase, putative; protein id: At1g28650.1
  misc_feature (21)..(85): NCBI GI NO: 15218751 NR Description: lipase, putative; protein id: At1g28640.1
  misc_feature (44)..(85): NCBI GI NO: 10764858 NR Description: F1K23.17 [Arabidopsis thaliana]
  misc_feature (44)..(85): NCBI GI NO: 15218728 NR Description: lipase, putative; protein id: At1g28590.1
  misc_feature (22)..(85): NCBI GI NO: 12322540 NR Description: unknown protein [Arabidopsis thaliana]
  misc_feature (25)..(85): NCBI GI NO: 34903958 NR Description: OSJNBa0038J17.24
  misc_feature (21)..(85): NCBI GI NO: 10764854 NR Description: F1K23.13 [Arabidopsis thaliana]
  misc_feature (22)..(85): NCBI GI NO: 30692564 NR Description: lipase, putative [Arabidopsis thaliana]
  misc_feature (21)..(85): NCBI GI NO: 25336243 NR Description: pnrotein F1K23.16
MATASAACHGGGIVYYKVLPMSMFLLLLRGLVQPVAAAACSVDAIYSFGDSIADTGNLLREGPVGFFASIGSYPYGQTLRKPTGRVLRRPPHHRLLRDGAEPIAGEPVPGQGSRLRQRRQLRGGRGHGAGPGRVAAERHHGSTGERAAQLPARLVQGAPQRHRLPLATRLRQEARRSAVLGRRDRRERLQLRLLTGIQVDRGHEGLRATGHKRHNGRRQGSDRARRDPDRDPGELPDRVLPELPLPLRRVRRPRRPGLPQELQRLRPAPQRAAPGGHRRAEEGQHRRHRRVRGLLRRLHAPAGPCFAPRVRAGRAPAGVLRGGRRVQLQHELDVRRAGHDDVRGPGAQRQLGRHPPHAAGVQGHRAVPSHGGVRAAG

SEQ ID NO: 41540 - protein, 357 aa, Zea mays subsp. mays
  peptide (1)..(357): Ceres Seq. ID no. 12376730
  misc_feature (1)..(43): NCBI GI NO: 15237586 NR Description: lipase -like protein; protein id: At5g03980.1
  misc_feature (4)..(65): NCBI GI NO: 15218753 NR Description: lipase, putative; protein id: At1g28650.1
  misc_feature (1)..(65): NCBI GI NO: 15218751 NR Description: lipase, putative; protein id: At1g28640.1
  misc_feature (24)..(65): NCBI GI NO: 10764858 NR Description: F1K23.17 [Arabidopsis thaliana]
  misc_feature (24)..(65): NCBI GI NO: 15218728 NR Description: lipase, putative; protein id: At1g28590.1
  misc_feature (2)..(65): NCBI GI NO: 12322540 NR Description: unknown protein [Arabidopsis thaliana]
  misc_feature (5)..(65): NCBI GI NO: 34903958 NR Description: OSJNBa0038J17.24
  misc_feature (1)..(65): NCBI GI NO: 10764854 NR Description: F1K23.13 [Arabidopsis thaliana]
  misc_feature (2)..(65): NCBI GI NO: 30692564 NR Description: lipase, putative [Arabidopsis thaliana]
  misc_feature (1)..(65): NCBI GI NO: 25336243 NR Description: pnrotein F1K23.16
MSMFLLLLRGLVQPVAAAACSVDAIYSFGDSIADTGNLLREGPVGFFASIGSYPYGQTLRKPTGRVLRRPPHHRLLRDGAEPIAGEPVPGQGSRLRQRRQLRGGRGHGAGPGRVAAERHHGSTGERAAQLPARLVQGAPQRHRLPLATRLRQEARRSAVLGRRDRRERLQLRLLTGIQVDRGHEGLRATGHKRHNGRRQGSDRARRDPDRDPGELPDRVLPELPLPLRRVRRPRRPGLPQELQRLRPAPQRAAPGGHRRAEEGQHRRHRRVRGLLRRLHAPAGPCFAPRVRAGRAPAGVLRGGRRVQLQHELDVRRAGHDDVRGPGAQRQLGRHPPHAAGVQGHRAVPSHGGVRAAG

SEQ ID NO: 41541 - protein, 355 aa, Zea mays subsp. mays
  peptide (1)..(355): Ceres Seq. ID no. 12376731
  misc_feature (1)..(41): NCBI GI NO: 15237586 NR Description: lipase -like protein; protein id: At5g03980.1
  misc_feature (2)..(63): NCBI GI NO: 15218753 NR Description: lipase, putative; protein id: At1g28650.1
  misc_feature (1)..(63): NCBI GI NO: 15218751 NR Description: lipase, putative; protein id: At1g28640.1
  misc_feature (22)..(63): NCBI GI NO: 10764858 NR Description: F1K23.17 [Arabidopsis thaliana]
  misc_feature (22)..(63): NCBI GI NO: 15218728 NR Description: lipase, putative; protein id: At1g28590.1
  misc_feature (1)..(63): NCBI GI NO: 12322540 NR Description: unknown protein [Arabidopsis thaliana]
  misc_feature (3)..(63): NCBI GI NO: 34903958 NR Description: OSJNBa0038J17.24
  misc_feature (1)..(63): NCBI GI NO: 10764854 NR Description: F1K23.13 [Arabidopsis thaliana]
  misc_feature (1)..(63): NCBI GI NO: 30692564 NR Description: lipase, putative [Arabidopsis thaliana]
  misc_feature (1)..(63): NCBI GI NO: 25336243 NR Description: pnrotein F1K23.16
MFLLLLRGLVQPVAAAACSVDAIYSFGDSIADTGNLLREGPVGFFASIGSYPYGQTLRKPTGRVLRRPPHHRLLRDGAEPIAGEPVPGQGSRLRQRRQLRGGRGHGAGPGRVAAERHHGSTGERAAQLPARLVQGAPQRHRLPLATRLRQEARRSAVLGRRDRRERLQLRLLTGIQVDRGHEGLRATGHKRHNGRRQGSDRARRDPDRDPGELPDRVLPELPLPLRRVRRPRRPGLPQELQRLRPAPQRAAPGGHRRAEEGQHRRHRRVRGLLRRLHAPAGPCFAPRVRAGRAPAGVLRGGRRVQLQHELDVRRAGHDDVRGPGAQRQLGRHPPHAAGVQGHRAVPSHGGVRAAG

SEQ ID NO: 41542 - protein, 289 aa, Zea mays subsp. mays
  peptide (1)..(289): Ceres Seq. ID no. 12376732
  misc_feature (1)..(271): Pfam Name: Pfam Description:  GDSL-like Lipase/Acylhydrolase
  misc_feature (23)..(265): NCBI GI NO: 15237586 NR Description: lipase -like protein; protein id: At5g03980.1
  misc_feature (1)..(279): NCBI GI NO: 34903978 NR Description: unnamed protein product
  misc_feature (1)..(289): NCBI GI NO: 15218753 NR Description: lipase, putative; protein id: At1g28650.1
  misc_feature (1)..(289): NCBI GI NO: 15218751 NR Description: lipase, putative; protein id: At1g28640.1
  misc_feature (1)..(289): NCBI GI NO: 10764858 NR Description: F1K23.17 [Arabidopsis thaliana]
  misc_feature (1)..(289): NCBI GI NO: 15218728 NR Description: lipase, putative; protein id: At1g28590.1
  misc_feature (1)..(289): NCBI GI NO: 12322540 NR Description: unknown protein [Arabidopsis thaliana]
  misc_feature (1)..(279): NCBI GI NO: 34903958 NR Description: OSJNBa0038J17.24
  misc_feature (1)..(289): NCBI GI NO: 10764854 NR Description: F1K23.13 [Arabidopsis thaliana]
  misc_feature (1)..(289): NCBI GI NO: 30692564 NR Description: lipase, putative [Arabidopsis thaliana]
MALNLSLVSPYLDKGADFASGANFAVAGATALDRAVLLQSGIMAPPASVPLSSQLDWFKAHLNATACPSLQDCAKKLAGALFLVGEIGGNDYNYGFLQGFRSIEAMKAYVPQVINAIMDVAKEVIELGATQIVIPGNFPIGCSPSYLSLFAASGDLDDRGCLRSYNAFAQHHNEQLQAAIDGLRKANTDVTVVYADYYGAFMHLLDHASLLGFEQGALLQACCGAGGAYNFNMNSMCGAPGTTTCADPARNVSWDGIHLTQQAYRAIALSLLMEGFAQPDDAVQEIWSC

SEQ ID NO: 41543 - DNA, 492 bp, Zea mays subsp. mays
  misc_feature (1)..(492): Ceres Seq. ID no. 13568253
ccggttttgtttgacgatagttgagtagacccctggcaatccacccttgcacggttcttttaggttttttgttcgtcatttgcagctgccattctgcctaaattgtttaagcgaacctcctccggggctctctttgttgaagttcgccacggtggcccatgtcagtgtgatgtaaggttggagttggagctgcaatgacataaaacatagaagccttgatgcatgattgaatacgaaaacaatgagcaggcgcaacagccgtaccatctatgtaggcaatctccctggggacatccgtgagagggaggttgaggatctcttctacaagtatggccgtattttggatattgacttgaaaatacctccgagacctcctggatacgcattcgttgagtttgaggatccacgtgatgctgatgatgcaatttatggccgtgatgggtataactttgatggctacaggttgagggttgaattagctcatggtggcag

SEQ ID NO: 41544 - protein, 83 aa, Zea mays subsp. mays
  peptide (1)..(83): Ceres Seq. ID no. 13568254
  misc_feature (9)..(77): Pfam Name: a.k.a. RRM, RBD, or RNP domain Pfam Description: RNA recognition motif.
  misc_feature (1)..(82): NCBI GI NO: 34894608 NR Description: putative pre-mRNA splicing factor SF2
  misc_feature (1)..(82): NCBI GI NO: 33146854 NR Description: putative pre-mRNA splicing factor SF2
  misc_feature (1)..(82): NCBI GI NO: 4775270 NR Description: SF2/ASF-like splicing modulator Srp30
  misc_feature (1)..(82): NCBI GI NO: 4775271 NR Description: SF2/ASF-like splicing modulator Srp30, variant 1
  misc_feature (1)..(82): NCBI GI NO: 22329428 NR Description: arginine/serine-rich splicing factor, atSRp30
  misc_feature (1)..(82): NCBI GI NO: 25386570 NR Description: hypothetical protein
  misc_feature (1)..(82): NCBI GI NO: 7484802 NR Description: alternative splicing factor ASF-2 homolog T14P8
  misc_feature (1)..(82): NCBI GI NO: 30679138 NR Description: arginine/serine-rich splicing factor
  misc_feature (1)..(82): NCBI GI NO: 30679143 NR Description: arginine/serine-rich splicing factor
  misc_feature (1)..(82): NCBI GI NO: 2129717 NR Description: splicing factor SF-2 homolog
MSRRNSRTIYVGNLPGDIREREVEDLFYKYGRILDIDLKIPPRPPGYAFVEFEDPRDADDAIYGRDGYNFDGYRLRVELAHGG

SEQ ID NO: 41545 - DNA, 1006 bp, Zea mays subsp. mays; identical to SEQ ID NO: 25923
  misc_feature (1)..(1006): Ceres Seq. ID no. 13495435

SEQ ID NO: 41546 - protein, 200 aa, Zea mays subsp. mays; identical to SEQ ID NO: 25924
  peptide (1)..(200): Ceres Seq. ID no. 13495436
  misc_feature (4)..(117): Pfam Name: Pfam Description:  SART-1 family
  misc_feature (3)..(200): NCBI GI NO: 18423973 NR Description: expressed protein [Arabidopsis thaliana]
  misc_feature (3)..(200): NCBI GI NO: 21592725 NR Description: unknown [Arabidopsis thaliana]
  misc_feature (1)..(196): NCBI GI NO: 23478750 NR Description: cyclophilin-RNA interacting protein
  misc_feature (3)..(161): NCBI GI NO: 23482058 NR Description: hypothetical protein [Plasmodium yoelii yoelii]
  misc_feature (3)..(161): NCBI GI NO: 23479655 NR Description: eukaryotic translation initiation factor 3 subunit10
  misc_feature (8)..(198): NCBI GI NO: 40738944 NR Description: hypothetical protein AN6605.2
  misc_feature (3)..(117): NCBI GI NO: 23510137 NR Description: Plasmodium falciparum protein kinase, putative
  misc_feature (3)..(113): NCBI GI NO: 23508822 NR Description: eukaryotic translation initiation factor 3 subunit10
  misc_feature (30)..(194): NCBI GI NO: 34856367 NR Description: similar to putative nucleic acid binding proteinRY-1
  misc_feature (22)..(194): NCBI GI NO: 7513213 NR Description: nucleic acid binding protein - human (fragment)

SEQ ID NO: 41547 - DNA, 472 bp, Zea mays subsp. mays
  misc_feature (1)..(472): Ceres Seq. ID no. 13568255
caaagaggggagacccgtttatattgaaaggcttggaaaggttgaccctaggcaaacttatgaatgtyacaacsaatkggrwycgatatgtgcgataccatgtgaaggagtttgagaggagcttcttgattaaatttccagcttgctctgttgctgcaaaaaggcacattgattccagcacaacaattctggatgtccagggcgtgggtttgaaaaatttcagcaaaactgcacgtgaattaattcagcgactgcagaaaattgacaatgataactacccagagactctataccaaatgtttattgtcaatgctggtccgggtttccggctactatggaacactgtgaagtcctttcttgatcccaaaactaccgccaagatacatgttcttgggaacaaataccaaagtaagctgcttgaaataattgacgccagtgaattgccggaattccttggtggcacttgtacctg

SEQ ID NO: 41548 - protein, 156 aa, Zea mays subsp. mays
  peptide (1)..(156): Ceres Seq. ID no. 13568256
  misc_feature (1)..(155): Pfam Name: Pfam Description:  CRAL/TRIO domain
  misc_feature (1)..(155): NCBI GI NO: 15224125 NR Description: phosphatidylinositol/phophatidylcholine transfer protein -related
  misc_feature (1)..(155): NCBI GI NO: 15234966 NR Description: SEC14 - like protein [Arabidopsis thaliana]
  misc_feature (1)..(155): NCBI GI NO: 15236152 NR Description: hypothetical protein [Arabidopsis thaliana]
  misc_feature (1)..(155): NCBI GI NO: 38707281 NR Description: can of worms 1 protein [Arabidopsis thaliana]
  misc_feature (1)..(155): NCBI GI NO: 15810425 NR Description: putative sec14 cytosolic factor
  misc_feature (1)..(155): NCBI GI NO: 18394768 NR Description: sec14 cytosolic factor -related
  misc_feature (1)..(155): NCBI GI NO: 25518427 NR Description: hypothetical protein F14P1.2
  misc_feature (1)..(155): NCBI GI NO: 14486705 NR Description: phosphatidylinositol transfer-like protein III
  misc_feature (1)..(155): NCBI GI NO: 14335006 NR Description: AT4g39170/T22F8_70 [Arabidopsis thaliana]
  misc_feature (1)..(155): NCBI GI NO: 18420392 NR Description: SEC14 - like protein [Arabidopsis thaliana]
  misc_feature (22)..(22): Xaa is any aa, unknown or other
  misc_feature (24)..(24): Xaa is any aa, unknown or other
  misc_feature (26)..(26): Xaa is any aa, unknown or other
  misc_feature (27)..(27): Xaa is any aa, unknown or other
KRGDPFILKGLERLTLGKLMNXTXNXXRYVRYHVKEFERSFLIKFPACSVAAKRHIDSSTTILDVQGVGLKNFSKTARELIQRLQKIDNDNYPETLYQMFIVNAGPGFRLLWNTVKSFLDPKTTAKIHVLGNKYQSKLLEIIDASELPEFLGGTCT

SEQ ID NO: 41549 - protein, 137 aa, Zea mays subsp. mays
  peptide (1)..(137): Ceres Seq. ID no. 13568257
  misc_feature (1)..(136): Pfam Name: Pfam Description:  CRAL/TRIO domain
  misc_feature (1)..(136): NCBI GI NO: 15224125 NR Description: phosphatidylinositol/phophatidylcholine transfer protein -related
  misc_feature (1)..(136): NCBI GI NO: 15234966 NR Description: SEC14 - like protein [Arabidopsis thaliana]
  misc_feature (1)..(136): NCBI GI NO: 15236152 NR Description: hypothetical protein [Arabidopsis thaliana]
  misc_feature (1)..(136): NCBI GI NO: 38707281 NR Description: can of worms 1 protein [Arabidopsis thaliana]
  misc_feature (1)..(136): NCBI GI NO: 15810425 NR Description: putative sec14 cytosolic factor
  misc_feature (1)..(136): NCBI GI NO: 25518427 NR Description: hypothetical protein F14P1.2
  misc_feature (1)..(136): NCBI GI NO: 18394768 NR Description: sec14 cytosolic factor -related
  misc_feature (1)..(136): NCBI GI NO: 14486705 NR Description: phosphatidylinositol transfer-like protein III
  misc_feature (1)..(136): NCBI GI NO: 14335006 NR Description: AT4g39170/T22F8_70 [Arabidopsis thaliana]
  misc_feature (1)..(136): NCBI GI NO: 18420392 NR Description: SEC14 - like protein [Arabidopsis thaliana]
  misc_feature (3)..(3): Xaa is any aa, unknown or other
  misc_feature (5)..(5): Xaa is any aa, unknown or other
  misc_feature (7)..(7): Xaa is any aa, unknown or other
  misc_feature (8)..(8): Xaa is any aa, unknown or other
MNXTXNXXRYVRYHVKEFERSFLIKFPACSVAAKRHIDSSTTILDVQGVGLKNFSKTARELIQRLQKIDNDNYPETLYQMFIVNAGPGFRLLWNTVKSFLDPKTTAKIHVLGNKYQSKLLEIIDASELPEFLGGTCT

SEQ ID NO: 41550 - DNA, 1604 bp, Zea mays subsp. mays
  misc_feature (1)..(1604): Ceres Seq. ID no. 12381743
gcacgagaccattacctagaacatcctaatcgaaaaatcaggctttgacacctgttagagcgcggacccgaaatcggattctaattgagctctgagcagcggtgtcctgagtccgtgaccgtgttctctcccccgcgcttcccttcaacgccgcctccctaaagatccgccgcttctctgccctctgctcgtcgattcggcgcctcctctccttcacgcgccccacgctgccgtcgcctcctcctcactgtcgtccatgccgctgtagccgcctacggccatggccgctggagccagcgactatttgacggtggagtaccactccagagagctcccctctttcctctccgacgacgagggagccaccgccggcagcggcgtcctcgtatgcagaacagcagaggacgctcgctcgctctgcgcgcatcgaaccaaaaaccacacctcggcggcagctatataaaagccttcacctgacccgggcgctagggtttattcgctcctcccacccgccgccgtcgccgcctcctctccccagcacccggagctcgctcgaccgccgctcaccatgatcatccccaagaagaaccgcaatgagatctgcaagtacctcttcaagggcttcacacagcaagcattgtaatgagcatcttccgatgggaagctattcaaagcttgatacaatagtgaacttaccttttgcgttgagtggaacagcaagctcacaggaaccaacaggcagcctgagcttctcctttagagctttcacgtcagatgcagccttgcaacatctctcgaccaaccagccacacgagtacagggaagcttaacagcaacaacatcgaagtgtgtcgctcttgaaaaactaggatctggaagcgaagggcaagatgcgggcgtgttgtatgccaagaaggactacaacctggcgaagcatccgcagatcgatgtgcccaacctccaggactccaggtgatcaagctcatgcagagctttaagtccaaggagtatgttagggagaccttctcctggcagtactactactggtacctcaccaacgatggcattgagcacctacgcaactacctgaacctccggtctgagatcgtgcctgccacgctcaagaagtctgccaggccaccgggccgcccatttggctctggccctcctggtgaccgcccaaggtctgcagccaatgaaaaaggttacatttgtgtccaaggtgaagcatggcgaatactacatcgaagccacatggcctttgggtacggctattgaggccgtgtcaccgacaaagcagatcggaaactaatgggccgctgctcgcactgaactgaactctggatttagcgcatgttatcatggttgcagttagcgctcctgacctataatatttgactctcaaataatttctgtactgctgctcggcagcgtgcatgcaaactgagcattttcgagtcagcctctgcgtctgtgtgcgggctaattcaactatgaaattcattcgaatttctttccactttcactttggtatcttcagtgcttacaggaatatgtaaacgtttgatgctttgctttaattctgtgaagctacatattcagcc

SEQ ID NO: 41551 - protein, 97 aa, Zea mays subsp. mays
  peptide (1)..(97): Ceres Seq. ID no. 12381744
  misc_feature (1)..(52): Pfam Name: Pfam Description:  Plectin/S10 domain
  misc_feature (1)..(74): NCBI GI NO: 15237217 NR Description: putative protein; protein id: At5g52650
  misc_feature (1)..(74): NCBI GI NO: 20139798 NR Description: 40S ribosomal protein S10-3
  misc_feature (1)..(74): NCBI GI NO: 34897532 NR Description: OSJNBa0042L16.3
  misc_feature (1)..(74): NCBI GI NO: 15235985 NR Description: putative ribosomal protein S10
  misc_feature (1)..(74): NCBI GI NO: 20140213 NR Description: 40S ribosomal protein S10
  misc_feature (1)..(74): NCBI GI NO: 34905824 NR Description: putative ribosomal protein S10
  misc_feature (1)..(74): NCBI GI NO: 15238099 NR Description: putative protein; protein id: At5g41520
  misc_feature (1)..(73): NCBI GI NO: 40642980 NR Description: ribosomal protein S10 [Crassostrea gigas]
  misc_feature (1)..(62): NCBI GI NO: 24266976 NR Description: ribosomal protein S10 [Branchiostoma belcheri]
  misc_feature (1)..(62): NCBI GI NO: 28200289 NR Description: ribosomal protein S10
MQSFKSKEYVRETFSWQYYYWYLTNDGIEHLRNYLNLRSEIVPATLKKSARPPGRPFGSGPPGDRPRSAANEKGYICVQGEAWRILHRSHMAFGYGY

SEQ ID NO: 41552 - protein, 78 aa, Zea mays subsp. mays
  peptide (1)..(78): Ceres Seq. ID no. 12381745
MRSASTSSRASHSKHCNEHLPMGSYSKLDTIVNLPFALSGTASSQEPTGSLSFSFRAFTSDAALQHLSTNQPHEYREA

SEQ ID NO: 41553 - protein, 60 aa, Zea mays subsp. mays
  peptide (1)..(60): Ceres Seq. ID no. 12381746
MAAGASDYLTVEYHSRELPSFLSDDEGATAGSGVLVCRTAEDARSLCAHRTKNHTSAAAI

SEQ ID NO: 41554 - DNA, 1434 bp, Zea mays subsp. mays
  misc_feature (1)..(1434): Ceres Seq. ID no. 12368425
gcacgagaccattacctagaacatcctaatcaaaaagattctgtttgtttcggttcgacagtaataatccggtcaagccgtagaaacttgataccgctgcggctgccccacgagggtgaatcgttacggttcggatattatcttctccgctccgcatcctctgtgtattttcaactcgacgcgttcgttcctatggcgggtccgaggaacagaggaaaccgcacacacccgcaaggatggcggtggcggctaggctctaccactcccgttcgccggagctgtagggcactttcggcgccatggcgatgtggtttggtggcagccggtctgcggcggccggcggatgccgtgaggccagcacatgcaatgcaacgctaggctatggctcaggcctcagggcggtggcgggcctggcggcgcggggagcgggttgcatctcgaccccttggcgtcgtgcactcatgacgagttgcagccaatgcaacatgggcataacagctgttgaagttgccgaccaaacagcaccttaaaaccgttcggttccataggaacaaagggctcctgttgcgccaaataagcagataagtaaaatggtggaagaggccgctaggttctctaagctgttctgtgatagaaacctgccgatctttgcattcctggatacccattatccagataagccggagccaccgtatcctcctcattgtatcattggtactggggaggagaacttcgttccagacctggagtggttggaaaaggagccaaatgtgactataaagaggaaaagttgtattgacggctacatcagctgcatagaggaggacgggtctagtgtttttgttgactgggtgggaaaatatcagatcaaaactgtcttggtactcgggatatgcacggacatctgtgttttggattttgcaagctcaactctggctgctcgaaacattgaccgagtgcctccattacgagatatcgtgatttattcagagaggtgcgctacatatgactttcctgttgagatcgctatgaatatcaaaggagctcttgcccatcctcaggacctgatgcatcatattggactctatatggccaaaggaaggggtgcaaaggttgttgacagggtggttattgaaccttgaataaaaaaacttccctcatcgtagtgatgttgctagagtttcctgtcttctcatccctccattgtaacaatcagatatatatgcgtcttagcataaagttgttgagatactaatgctagcgacaactatgttgacttgtcgagtatgtagagatgggctcatcattttgtggtgagcttgtacatatttcctgagattactttgtcctgccaaacatgcgccagttctccattggttgctaatgttcggctctgggattgtatattcgtatttaataaaagtacttcctccc

SEQ ID NO: 41555 - protein, 183 aa, Zea mays subsp. mays
  peptide (1)..(183): Ceres Seq. ID no. 12368426
  misc_feature (1)..(158): Pfam Name: Pfam Description:  Isochorismatase family
  misc_feature (1)..(182): NCBI GI NO: 18400020 NR Description: expressed protein; protein id: At2g22570
  misc_feature (1)..(182): NCBI GI NO: 21537016 NR Description: unknown [Arabidopsis thaliana]
  misc_feature (1)..(158): NCBI GI NO: 15144508 NR Description: unknown [Lycopersicon esculentum]
  misc_feature (1)..(157): NCBI GI NO: 25412119 NR Description: hypothetical protein At2g22570
  misc_feature (1)..(179): NCBI GI NO: 23042463 NR Description: hypothetical protein
MVEEAARFSKLFCDRNLPIFAFLDTHYPDKPEPPYPPHCIIGTGEENFVPDLEWLEKEPNVTIKRKSCIDGYISCIEEDGSSVFVDWVGKYQIKTVLVLGICTDICVLDFASSTLAARNIDRVPPLRDIVIYSERCATYDFPVEIAMNIKGALAHPQDLMHHIGLYMAKGRGAKVVDRVVIEP

SEQ ID NO: 41556 - protein, 125 aa, Zea mays subsp. mays
  peptide (1)..(125): Ceres Seq. ID no. 12368427
ARDHYLEHPNQKDSVCFGSTVIIRSSRRNLIPLRLPHEGESLRFGYYLLRSASSVYFQLDAFVPMAGPRNRGNRTHPQGWRWRLGSTTPVRRSCRALSAPWRCGLVAAGLRRPADAVRPAHAMQR

SEQ ID NO: 41557 - DNA, 518 bp, Zea mays subsp. mays
  misc_feature (1)..(518): Ceres Seq. ID no. 12418782
gataggaaggcatattatggattcatcaagattttatgtgggattgagagggttgagcatgctgtcaaggtattccgtatgatgaaaggttatgggcatgctcctggagtaaaatcatatagcttgctcattgagaagctggccagacacaatttaggggatcgttctaatgcacttttcagggaggcagttgcacgtggtgtacctgtggcacaaggagagtacaatgttgacaaaaggtatgtcaagacaaagaaggagaagacggtgaagaagaggctgactttgccagagaagatgagattgaagagcaagaggttatacaagctcagaatgagctttgtcaagaagcccaagcgtcgaatgctccgggtttaagcataattttggtttggttggagcggatgatcatgggagcggacaccaccagatccagttatatctcggaagatcagaaaattgtagtcccttaactgtgcctgcccttgtgagtgactatgcaacatcattttttcgaa

SEQ ID NO: 41558 - protein, 125 aa, Zea mays subsp. mays
  peptide (1)..(125): Ceres Seq. ID no. 12418783
  misc_feature (3)..(37): Pfam Name: Pfam Description:  PPR repeat
  misc_feature (1)..(125): NCBI GI NO: 34394565 NR Description: unknown protein
  misc_feature (1)..(124): NCBI GI NO: 15239488 NR Description: putative protein; protein id: At5g60960
  misc_feature (1)..(124): NCBI GI NO: 21554346 NR Description: unknown [Arabidopsis thaliana]
  misc_feature (1)..(121): NCBI GI NO: 15240232 NR Description: putative protein; protein id: At5g61370
  misc_feature (1)..(121): NCBI GI NO: 21593376 NR Description: unknown [Arabidopsis thaliana]
DRKAYYGFIKILCGIERVEHAVKVFRMMKGYGHAPGVKSYSLLIEKLARHNLGDRSNALFREAVARGVPVAQGEYNVDKRYVKTKKEKTVKKRLTLPEKMRLKSKRLYKLRMSFVKKPKRRMLRV

SEQ ID NO: 41559 - protein, 99 aa, Zea mays subsp. mays
  peptide (1)..(99): Ceres Seq. ID no. 12418784
  misc_feature (1)..(99): NCBI GI NO: 34394565 NR Description: unknown protein
  misc_feature (1)..(98): NCBI GI NO: 15239488 NR Description: putative protein; protein id: At5g60960
  misc_feature (1)..(98): NCBI GI NO: 21554346 NR Description: unknown [Arabidopsis thaliana]
  misc_feature (1)..(95): NCBI GI NO: 15240232 NR Description: putative protein; protein id: At5g61370
  misc_feature (1)..(95): NCBI GI NO: 21593376 NR Description: unknown [Arabidopsis thaliana]
MMKGYGHAPGVKSYSLLIEKLARHNLGDRSNALFREAVARGVPVAQGEYNVDKRYVKTKKEKTVKKRLTLPEKMRLKSKRLYKLRMSFVKKPKRRMLRV

SEQ ID NO: 41560 - protein, 98 aa, Zea mays subsp. mays
  peptide (1)..(98): Ceres Seq. ID no. 12418785
  misc_feature (1)..(98): NCBI GI NO: 34394565 NR Description: unknown protein
  misc_feature (1)..(97): NCBI GI NO: 15239488 NR Description: putative protein; protein id: At5g60960
  misc_feature (1)..(97): NCBI GI NO: 21554346 NR Description: unknown [Arabidopsis thaliana]
  misc_feature (1)..(94): NCBI GI NO: 15240232 NR Description: putative protein; protein id: At5g61370
  misc_feature (1)..(94): NCBI GI NO: 21593376 NR Description: unknown [Arabidopsis thaliana]
MKGYGHAPGVKSYSLLIEKLARHNLGDRSNALFREAVARGVPVAQGEYNVDKRYVKTKKEKTVKKRLTLPEKMRLKSKRLYKLRMSFVKKPKRRMLRV

SEQ ID NO: 41561 - DNA, 984 bp, Zea mays subsp. mays
  misc_feature (1)..(984): Ceres Seq. ID no. 12363527
gcacgagaccattacctagaacatcctaatcgaaaaaaaatatcttctcttctttgttgttacatgcatactgaagttcaaactggacaagaatcttctgtttactctccggccgctgcctatatcgacttctagagctcatccctcaatttctttctcttcgagattatattttaatttgctactgcttcgatggacagtgccatgtaaaggaaaggagttgatctgattgcatgctgtgattattgattttgtgcttcttgggtagctgcaggttggggttccatgcaagaggctcatggacacggtgactgtcaagtgcggccactgcaacaacctctcctacctcagtccacggccccccatggtgcagccgctctcgccgactgatcatcccttggggccattccagtgtcagggaccctgcagtgagtgcaggaggaaccaaccgctgccgctggcctcgccgacatcgactgacctcaccccgagaatgcccttcgttgtcaagcccccggagaagaaacatcgcctcccatctgcttacaatcgcttcatgagggaggagattcagcgcatcaaagctgcgaagcctgatatccctcacagagaggccttcagcatggctgccaagaattgggcgaagtgtgacccgcgctgctcgacgactgcctctactgccacttctaacagcgctcctgaggctgctagagtcgtgcccactcctcatgtaactgagccacgctttgatctggaggatagggccaaggagcatgtcattgagagcttcgacatcttcaagcagattgagcgcaccatctagatgtctccatgtcgaaatggtgcggtagcccaggatcgagtaccatcacatcctgtactttttaccccccatgttactgttgctattattcttgctcttgttggattgtacgcaccctttaattatggacagctgctaccctttataatgtttgccatcgt

SEQ ID NO: 41562 - protein, 174 aa, Zea mays subsp. mays
  peptide (1)..(174): Ceres Seq. ID no. 12363528
  misc_feature (1)..(124): Pfam Name: Pfam Description:  YABBY protein
  misc_feature (1)..(173): NCBI GI NO: 40362873 NR Description: drooping leaf
  misc_feature (1)..(173): NCBI GI NO: 33333529 NR Description: CRC-related protein [Triticum aestivum]
  misc_feature (1)..(133): NCBI GI NO: 37542843 NR Description: crabs claw
  misc_feature (1)..(131): NCBI GI NO: 15222228 NR Description: transcription factor CRC; protein id: At1g69180
  misc_feature (1)..(131): NCBI GI NO: 21617944 NR Description: transcription factor CRC [Arabidopsis thaliana]
  misc_feature (44)..(115): NCBI GI NO: 32330677 NR Description: yabby15 protein [Zea mays]
  misc_feature (1)..(29): NCBI GI NO: 32330677 NR Description: yabby15 protein [Zea mays]
  misc_feature (1)..(115): NCBI GI NO: 27804377 NR Description: MADS-box transcription factor CDM51
  misc_feature (64)..(115): NCBI GI NO: 18411242 NR Description: putative YABBY3 axial regulator
  misc_feature (1)..(35): NCBI GI NO: 18411242 NR Description: putative YABBY3 axial regulator
MDTVTVKCGHCNNLSYLSPRPPMVQPLSPTDHPLGPFQCQGPCSECRRNQPLPLASPTSTDLTPRMPFVVKPPEKKHRLPSAYNRFMREEIQRIKAAKPDIPHREAFSMAAKNWAKCDPRCSTTASTATSNSAPEAARVVPTPHVTEPRFDLEDRAKEHVIESFDIFKQIERTI

SEQ ID NO: 41563 - protein, 152 aa, Zea mays subsp. mays
  peptide (1)..(152): Ceres Seq. ID no. 12363529
  misc_feature (1)..(102): Pfam Name: Pfam Description:  YABBY protein
  misc_feature (1)..(151): NCBI GI NO: 40362873 NR Description: drooping leaf
  misc_feature (1)..(151): NCBI GI NO: 33333529 NR Description: CRC-related protein [Triticum aestivum]
  misc_feature (1)..(111): NCBI GI NO: 37542843 NR Description: crabs claw
  misc_feature (1)..(109): NCBI GI NO: 15222228 NR Description: transcription factor CRC; protein id: At1g69180
  misc_feature (1)..(109): NCBI GI NO: 21617944 NR Description: transcription factor CRC [Arabidopsis thaliana]
  misc_feature (22)..(93): NCBI GI NO: 32330677 NR Description: yabby15 protein [Zea mays]
  misc_feature (1)..(93): NCBI GI NO: 27804377 NR Description: MADS-box transcription factor CDM51
  misc_feature (42)..(93): NCBI GI NO: 18411242 NR Description: putative YABBY3 axial regulator
  misc_feature (1)..(13): NCBI GI NO: 18411242 NR Description: putative YABBY3 axial regulator
  misc_feature (1)..(93): NCBI GI NO: 30683176 NR Description: expressed protein [Arabidopsis thaliana]
MVQPLSPTDHPLGPFQCQGPCSECRRNQPLPLASPTSTDLTPRMPFVVKPPEKKHRLPSAYNRFMREEIQRIKAAKPDIPHREAFSMAAKNWAKCDPRCSTTASTATSNSAPEAARVVPTPHVTEPRFDLEDRAKEHVIESFDIFKQIERTI

SEQ ID NO: 41564 - protein, 109 aa, Zea mays subsp. mays
  peptide (1)..(109): Ceres Seq. ID no. 12363530
  misc_feature (1)..(59): Pfam Name: Pfam Description:  YABBY protein
  misc_feature (1)..(108): NCBI GI NO: 40362873 NR Description: drooping leaf
  misc_feature (1)..(108): NCBI GI NO: 33333529 NR Description: CRC-related protein [Triticum aestivum]
  misc_feature (1)..(68): NCBI GI NO: 37542843 NR Description: crabs claw
  misc_feature (1)..(66): NCBI GI NO: 15222228 NR Description: transcription factor CRC; protein id: At1g69180
  misc_feature (1)..(66): NCBI GI NO: 21617944 NR Description: transcription factor CRC [Arabidopsis thaliana]
  misc_feature (1)..(50): NCBI GI NO: 32330677 NR Description: yabby15 protein [Zea mays]
  misc_feature (1)..(50): NCBI GI NO: 27804377 NR Description: MADS-box transcription factor CDM51
  misc_feature (1)..(50): NCBI GI NO: 18411242 NR Description: putative YABBY3 axial regulator
  misc_feature (1)..(50): NCBI GI NO: 30683176 NR Description: expressed protein [Arabidopsis thaliana]
  misc_feature (1)..(50): NCBI GI NO: 4928751 NR Description: YABBY2 [Arabidopsis thaliana]
MPFVVKPPEKKHRLPSAYNRFMREEIQRIKAAKPDIPHREAFSMAAKNWAKCDPRCSTTASTATSNSAPEAARVVPTPHVTEPRFDLEDRAKEHVIESFDIFKQIERTI

SEQ ID NO: 41565 - DNA, 1149 bp, Zea mays subsp. mays
  misc_feature (1)..(1149): Ceres Seq. ID no. 13492380
ccacgtcccacccctcctgcatttcaaaataggcgtatctccctgcgcttttcctagccctttgtcatccaaggaaacaataaacaaccggcgcttttacacccccgccaagaacaggagcaacaacaacaaggctcctcgcaacaatccattctcatccatggcgaagctcatgaacaagttggtcgattcgttcgagcacgacgagataccggacgtcggctgcgtgcgcgccgtgctggccgagctcgtcctcaccttcctcttcgtcttcaccggcgtctccgccgccatggccgccggatccgacgggaagcccggcgacgctatgccgatggcgacgctggcggcggtggcaatcgcgcacgcgctggccgctggcgtcctggtgacggccgggttccacgtctccggcggccacctgaaccccgcggtgacggtggggctcatggtgcgcggccacatcaccaagctccgggcggtgctgtacgtcgccgcccagctgctggcctcctccgccgcctgcgtcctcctccgcttcctcagcggcggcatggtgaccccggtgcacgccctgggcaggggcatcagcccgatgcagggcctggtgatggaggtgatcctcaccttctccctgctcttcgtcacctacgccatgatcctggacccgcggagccaggtccgcgccatcggcccgctgctgacgggcctcatcgtcggcgccaacagcctcgccggcggcaacttcaccggcgcgtccatgaacccggcacgctccttcggcccggccctggccaccggggactggacaaaccactgggtctactggatcggcccgctgctcggcgggcccctggcaggcttcgtgtacgagtcgctgttcctggtgcagaagatgcacgagccgctgctcaatggggaagtctgacgaccatcagcccctgtgttgtggcgcatgcttcatgcttgtttctgtaaaacaggtcattctctgcaagcatggtacatacattggccaaggtaattagagaggcttgctgtaaagcagtaggattgctggctgtagaaattgttgatgggctttttttgggggtttcctgccaaggaattctttcttttatataatctcaaaaaagttttttttttggt

SEQ ID NO: 41566 - protein, 308 aa, Zea mays subsp. mays
  peptide (1)..(308): Ceres Seq. ID no. 13492381
  misc_feature (69)..(290): Pfam Name: Pfam Description:  Major intrinsic protein
  misc_feature (54)..(308): NCBI GI NO: 13447829 NR Description: tonoplast membrane integral protein ZmTIP4-1
  misc_feature (54)..(308): NCBI GI NO: 13447831 NR Description: tonoplast membrane integral protein ZmTIP4-2
  misc_feature (67)..(303): NCBI GI NO: 13447835 NR Description: tonoplast membrane integral protein ZmTIP4-4
  misc_feature (67)..(303): NCBI GI NO: 34904332 NR Description: unnamed protein product
  misc_feature (77)..(304): NCBI GI NO: 13447833 NR Description: tonoplast membrane integral protein ZmTIP4-3
  misc_feature (60)..(307): NCBI GI NO: 15225195 NR Description: tonoplast intrinsic protein, putative
  misc_feature (58)..(307): NCBI GI NO: 4584429 NR Description: aquaglyceroporin; tonoplast intrinsic protein
  misc_feature (58)..(303): NCBI GI NO: 34904336 NR Description: unnamed protein product
  misc_feature (67)..(307): NCBI GI NO: 4138262 NR Description: aquaporin 1 [Nicotiana tabacum]
  misc_feature (68)..(303): NCBI GI NO: 7441262 NR Description: aquaporin-like protein - Norway spruce
HVPPLLHFKIGVSPCAFPSPLSSKETINNRRFYTPAKNRSNNNKAPRNNPFSSMAKLMNKLVDSFEHDEIPDVGCVRAVLAELVLTFLFVFTGVSAAMAAGSDGKPGDAMPMATLAAVAIAHALAAGVLVTAGFHVSGGHLNPAVTVGLMVRGHITKLRAVLYVAAQLLASSAACVLLRFLSGGMVTPVHALGRGISPMQGLVMEVILTFSLLFVTYAMILDPRSQVRAIGPLLTGLIVGANSLAGGNFTGASMNPARSFGPALATGDWTNHWVYWIGPLLGGPLAGFVYESLFLVQKMHEPLLNGEV

SEQ ID NO: 41567 - protein, 255 aa, Zea mays subsp. mays
  peptide (1)..(255): Ceres Seq. ID no. 13492382
  misc_feature (16)..(237): Pfam Name: Pfam Description:  Major intrinsic protein
  misc_feature (1)..(255): NCBI GI NO: 13447829 NR Description: tonoplast membrane integral protein ZmTIP4-1
  misc_feature (1)..(255): NCBI GI NO: 13447831 NR Description: tonoplast membrane integral protein ZmTIP4-2
  misc_feature (14)..(250): NCBI GI NO: 13447835 NR Description: tonoplast membrane integral protein ZmTIP4-4
  misc_feature (14)..(250): NCBI GI NO: 34904332 NR Description: unnamed protein product
  misc_feature (24)..(251): NCBI GI NO: 13447833 NR Description: tonoplast membrane integral protein ZmTIP4-3
  misc_feature (7)..(254): NCBI GI NO: 15225195 NR Description: tonoplast intrinsic protein, putative
  misc_feature (5)..(254): NCBI GI NO: 4584429 NR Description: aquaglyceroporin; tonoplast intrinsic protein
  misc_feature (5)..(250): NCBI GI NO: 34904336 NR Description: unnamed protein product
  misc_feature (14)..(254): NCBI GI NO: 4138262 NR Description: aquaporin 1 [Nicotiana tabacum]
  misc_feature (15)..(250): NCBI GI NO: 7441262 NR Description: aquaporin-like protein - Norway spruce
MAKLMNKLVDSFEHDEIPDVGCVRAVLAELVLTFLFVFTGVSAAMAAGSDGKPGDAMPMATLAAVAIAHALAAGVLVTAGFHVSGGHLNPAVTVGLMVRGHITKLRAVLYVAAQLLASSAACVLLRFLSGGMVTPVHALGRGISPMQGLVMEVILTFSLLFVTYAMILDPRSQVRAIGPLLTGLIVGANSLAGGNFTGASMNPARSFGPALATGDWTNHWVYWIGPLLGGPLAGFVYESLFLVQKMHEPLLNGEV

SEQ ID NO: 41568 - protein, 251 aa, Zea mays subsp. mays
  peptide (1)..(251): Ceres Seq. ID no. 13492383
  misc_feature (12)..(233): Pfam Name: Pfam Description:  Major intrinsic protein
  misc_feature (1)..(251): NCBI GI NO: 13447829 NR Description: tonoplast membrane integral protein ZmTIP4-1
  misc_feature (1)..(251): NCBI GI NO: 13447831 NR Description: tonoplast membrane integral protein ZmTIP4-2
  misc_feature (10)..(246): NCBI GI NO: 13447835 NR Description: tonoplast membrane integral protein ZmTIP4-4
  misc_feature (10)..(246): NCBI GI NO: 34904332 NR Description: unnamed protein product
  misc_feature (20)..(247): NCBI GI NO: 13447833 NR Description: tonoplast membrane integral protein ZmTIP4-3
  misc_feature (3)..(250): NCBI GI NO: 15225195 NR Description: tonoplast intrinsic protein, putative
  misc_feature (1)..(250): NCBI GI NO: 4584429 NR Description: aquaglyceroporin; tonoplast intrinsic protein
  misc_feature (1)..(246): NCBI GI NO: 34904336 NR Description: unnamed protein product
  misc_feature (10)..(250): NCBI GI NO: 4138262 NR Description: aquaporin 1 [Nicotiana tabacum]
  misc_feature (11)..(246): NCBI GI NO: 7441262 NR Description: aquaporin-like protein - Norway spruce
MNKLVDSFEHDEIPDVGCVRAVLAELVLTFLFVFTGVSAAMAAGSDGKPGDAMPMATLAAVAIAHALAAGVLVTAGFHVSGGHLNPAVTVGLMVRGHITKLRAVLYVAAQLLASSAACVLLRFLSGGMVTPVHALGRGISPMQGLVMEVILTFSLLFVTYAMILDPRSQVRAIGPLLTGLIVGANSLAGGNFTGASMNPARSFGPALATGDWTNHWVYWIGPLLGGPLAGFVYESLFLVQKMHEPLLNGEV

SEQ ID NO: 41569 - DNA, 1770 bp, Zea mays subsp. mays; identical to SEQ ID NO: 30127
  misc_feature (1)..(1770): Ceres Seq. ID no. 12405403

SEQ ID NO: 41570 - protein, 292 aa, Zea mays subsp. mays; identical to SEQ ID NO: 30128
  peptide (1)..(292): Ceres Seq. ID no. 12405404
  misc_feature (1)..(230): NCBI GI NO: 34905486 NR Description: P0682B08.18
  misc_feature (10)..(269): NCBI GI NO: 34905490 NR Description: P0682B08.20
  misc_feature (3)..(252): NCBI GI NO: 18411800 NR Description: expressed protein; protein id: At4g01990
  misc_feature (3)..(252): NCBI GI NO: 25407143 NR Description: hypothetical protein AT4g01990
  misc_feature (10)..(265): NCBI GI NO: 15217734 NR Description: hypothetical protein; protein id: At1g02370
  misc_feature (10)..(265): NCBI GI NO: 17529324 NR Description: unknown protein [Arabidopsis thaliana]
  misc_feature (10)..(267): NCBI GI NO: 15219808 NR Description: hypothetical protein; protein id: At1g60770.1
  misc_feature (3)..(254): NCBI GI NO: 15235508 NR Description: hypothetical protein; protein id: At4g02820
  misc_feature (3)..(254): NCBI GI NO: 17064738 NR Description: Unknown protein [Arabidopsis thaliana]
  misc_feature (1)..(230): NCBI GI NO: 22329290 NR Description: hypothetical protein; protein id: At1g02150

SEQ ID NO: 41571 - protein, 280 aa, Zea mays subsp. mays; identical to SEQ ID NO: 30129
  peptide (1)..(280): Ceres Seq. ID no. 12405405
  misc_feature (151)..(185): Pfam Name: Pfam Description:  PPR repeat
  misc_feature (78)..(245): NCBI GI NO: 34905486 NR Description: P0682B08.18
  misc_feature (17)..(243): NCBI GI NO: 34905490 NR Description: P0682B08.20
  misc_feature (13)..(243): NCBI GI NO: 18411800 NR Description: expressed protein; protein id: At4g01990
  misc_feature (13)..(243): NCBI GI NO: 25407143 NR Description: hypothetical protein AT4g01990
  misc_feature (19)..(243): NCBI GI NO: 15217734 NR Description: hypothetical protein; protein id: At1g02370
  misc_feature (19)..(243): NCBI GI NO: 17529324 NR Description: unknown protein [Arabidopsis thaliana]
  misc_feature (50)..(264): NCBI GI NO: 15219808 NR Description: hypothetical protein; protein id: At1g60770.1
  misc_feature (7)..(279): NCBI GI NO: 15235508 NR Description: hypothetical protein; protein id: At4g02820
  misc_feature (7)..(279): NCBI GI NO: 17064738 NR Description: Unknown protein [Arabidopsis thaliana]
  misc_feature (50)..(240): NCBI GI NO: 22329290 NR Description: hypothetical protein; protein id: At1g02150

SEQ ID NO: 41572 - protein, 206 aa, Zea mays subsp. mays; identical to SEQ ID NO: 30130
  peptide (1)..(206): Ceres Seq. ID no. 12405406
  misc_feature (1)..(144): NCBI GI NO: 34905486 NR Description: P0682B08.18
  misc_feature (1)..(183): NCBI GI NO: 34905490 NR Description: P0682B08.20
  misc_feature (1)..(166): NCBI GI NO: 18411800 NR Description: expressed protein; protein id: At4g01990
  misc_feature (1)..(166): NCBI GI NO: 25407143 NR Description: hypothetical protein AT4g01990
  misc_feature (1)..(179): NCBI GI NO: 15217734 NR Description: hypothetical protein; protein id: At1g02370
  misc_feature (1)..(179): NCBI GI NO: 17529324 NR Description: unknown protein [Arabidopsis thaliana]
  misc_feature (1)..(181): NCBI GI NO: 15219808 NR Description: hypothetical protein; protein id: At1g60770.1
  misc_feature (1)..(168): NCBI GI NO: 15235508 NR Description: hypothetical protein; protein id: At4g02820
  misc_feature (1)..(168): NCBI GI NO: 17064738 NR Description: Unknown protein [Arabidopsis thaliana]
  misc_feature (1)..(144): NCBI GI NO: 22329290 NR Description: hypothetical protein; protein id: At1g02150

SEQ ID NO: 41573 - DNA, 482 bp, Zea mays subsp. mays
  misc_feature (1)..(482): Ceres Seq. ID no. 2113060
gagaactagacgccactcctacagttttacgtttacccaccaccaccagtccaccaccgagcattagcttcccgaccagatcaaccaggcccgccccgacccgaagatgcagcggtggctcccggcgctcctccgccgcgccgcgcccggcggcggggcggcgcggctcttcgcctcgtcctccctcctcttcgacgacacgcaggagcaggttgtttatgcaaaaacagatctaactgcgggatcaaaaggaataactgcattcataatcgagaaagggatgcccgggttcagtactgctcagaaattggacaaacttggcatgagaggaagcgacacatgtgaacttgtttttgagaactgctttgtgccacgcgagaatgtcctcggtgaagaaggcaaaggtgtttatgtcatgatgtcagggcttgatctggaaaggcttgtattagctgcgggccctattggccttatgcaggcat

SEQ ID NO: 41574 - protein, 125 aa, Zea mays subsp. mays
  peptide (1)..(125): Ceres Seq. ID no. 2113061
  misc_feature (33)..(94): Pfam Name: Pfam Description:  Acyl-CoA dehydrogenase, middle domain
  misc_feature (33)..(124): NCBI GI NO: 5869965 NR Description: Isovaleryl-CoA Dehydrogenase
  misc_feature (33)..(124): NCBI GI NO: 5869967 NR Description: auxin binding protein
  misc_feature (36)..(124): NCBI GI NO: 25453062 NR Description: Isovaleryl-CoA dehydrogenase 1
  misc_feature (33)..(124): NCBI GI NO: 25453061 NR Description: Isovaleryl-CoA dehydrogenase 2
  misc_feature (36)..(124): NCBI GI NO: 15230664 NR Description: isovaleryl-CoA-dehydrogenase precursor
  misc_feature (36)..(124): NCBI GI NO: 25090618 NR Description: Isovaleryl-CoA dehydrogenase
  misc_feature (36)..(124): NCBI GI NO: 17064982 NR Description: isovaleryl-CoA-dehydrogenase precursor (IVD)
  misc_feature (31)..(124): NCBI GI NO: 9789985 NR Description: isovaleryl coenzyme A dehydrogenase
  misc_feature (31)..(124): NCBI GI NO: 12857011 NR Description: unnamed protein product [Mus musculus]
  misc_feature (31)..(124): NCBI GI NO: 12836655 NR Description: unnamed protein product [Mus musculus]
MQRWLPALLRRAAPGGGAARLFASSSLLFDDTQEQVVYAKTDLTAGSKGITAFIIEKGMPGFSTAQKLDKLGMRGSDTCELVFENCFVPRENVLGEEGKGVYVMMSGLDLERLVLAAGPIGLMQA

SEQ ID NO: 41575 - protein, 77 aa, Zea mays subsp. mays
  peptide (1)..(77): Ceres Seq. ID no. 2113062
ELDATPTVLRLPTTTSPPPSISFPTRSTRPAPTRRCSGGSRRSSAAPRPAAGRRGSSPRPPSSSTTRRSRLFMQKQI

SEQ ID NO: 41576 - protein, 67 aa, Zea mays subsp. mays
  peptide (1)..(67): Ceres Seq. ID no. 2113063
  misc_feature (1)..(66): NCBI GI NO: 5869965 NR Description: Isovaleryl-CoA Dehydrogenase
  misc_feature (1)..(66): NCBI GI NO: 5869967 NR Description: auxin binding protein
  misc_feature (1)..(66): NCBI GI NO: 25453062 NR Description: Isovaleryl-CoA dehydrogenase 1
  misc_feature (1)..(66): NCBI GI NO: 25453061 NR Description: Isovaleryl-CoA dehydrogenase 2
  misc_feature (1)..(66): NCBI GI NO: 15230664 NR Description: isovaleryl-CoA-dehydrogenase precursor
  misc_feature (1)..(66): NCBI GI NO: 25090618 NR Description: Isovaleryl-CoA dehydrogenase
  misc_feature (1)..(66): NCBI GI NO: 17064982 NR Description: isovaleryl-CoA-dehydrogenase precursor (IVD)
  misc_feature (1)..(66): NCBI GI NO: 9789985 NR Description: isovaleryl coenzyme A dehydrogenase
  misc_feature (1)..(66): NCBI GI NO: 12857011 NR Description: unnamed protein product [Mus musculus]
  misc_feature (1)..(66): NCBI GI NO: 12836655 NR Description: unnamed protein product [Mus musculus]
MPGFSTAQKLDKLGMRGSDTCELVFENCFVPRENVLGEEGKGVYVMMSGLDLERLVLAAGPIGLMQA

SEQ ID NO: 41577 - DNA, 1856 bp, Zea mays subsp. mays; identical to SEQ ID NO: 25749
  misc_feature (1)..(1856): Ceres Seq. ID no. 13635560
  misc_feature (1488)..(1488): n is a, c, t, g, unknown, or other

SEQ ID NO: 41578 - protein, 549 aa, Zea mays subsp. mays; identical to SEQ ID NO: 25750
  peptide (1)..(549): Ceres Seq. ID no. 13635561
  misc_feature (25)..(381): Pfam Name: Pfam Description:  Calreticulin family
  misc_feature (1)..(531): NCBI GI NO: 21740628 NR Description: OSJNBb0012E08.10
  misc_feature (107)..(482): NCBI GI NO: 7441503 NR Description: calnexin - maize (fragment)
  misc_feature (2)..(531): NCBI GI NO: 3334138 NR Description: CALNEXIN HOMOLOG PRECURSOR
  misc_feature (7)..(533): NCBI GI NO: 15240353 NR Description: calnexin 1 (CNX1) [Arabidopsis thaliana]
  misc_feature (6)..(533): NCBI GI NO: 31321896 NR Description: putative papillar cell-specific calnexin
  misc_feature (2)..(531): NCBI GI NO: 11131469 NR Description: Calnexin homolog precursor
  misc_feature (7)..(531): NCBI GI NO: 15240773 NR Description: calnexin, putative [Arabidopsis thaliana]
  misc_feature (7)..(531): NCBI GI NO: 473878 NR Description: calnexin homolog
  misc_feature (10)..(531): NCBI GI NO: 11131766 NR Description: Calnexin homolog precursor
  misc_feature (24)..(535): NCBI GI NO: 18564808 NR Description: calnexin [Aspergillus niger]
  misc_feature (496)..(496): Xaa is any aa, unknown or other

SEQ ID NO: 41579 - protein, 548 aa, Zea mays subsp. mays; identical to SEQ ID NO: 25751
  peptide (1)..(548): Ceres Seq. ID no. 13635562
  misc_feature (24)..(380): Pfam Name: Pfam Description:  Calreticulin family
  misc_feature (1)..(530): NCBI GI NO: 21740628 NR Description: OSJNBb0012E08.10
  misc_feature (106)..(481): NCBI GI NO: 7441503 NR Description: calnexin - maize (fragment)
  misc_feature (1)..(530): NCBI GI NO: 3334138 NR Description: CALNEXIN HOMOLOG PRECURSOR
  misc_feature (6)..(532): NCBI GI NO: 15240353 NR Description: calnexin 1 (CNX1) [Arabidopsis thaliana]
  misc_feature (5)..(532): NCBI GI NO: 31321896 NR Description: putative papillar cell-specific calnexin
  misc_feature (1)..(530): NCBI GI NO: 11131469 NR Description: Calnexin homolog precursor
  misc_feature (6)..(530): NCBI GI NO: 15240773 NR Description: calnexin, putative [Arabidopsis thaliana]
  misc_feature (6)..(530): NCBI GI NO: 473878 NR Description: calnexin homolog
  misc_feature (9)..(530): NCBI GI NO: 11131766 NR Description: Calnexin homolog precursor
  misc_feature (23)..(534): NCBI GI NO: 18564808 NR Description: calnexin [Aspergillus niger]
  misc_feature (495)..(495): Xaa is any aa, unknown or other

SEQ ID NO: 41580 - protein, 418 aa, Zea mays subsp. mays; identical to SEQ ID NO: 25752
  peptide (1)..(418): Ceres Seq. ID no. 13635563
  misc_feature (1)..(250): Pfam Name: Pfam Description:  Calreticulin family
  misc_feature (1)..(400): NCBI GI NO: 21740628 NR Description: OSJNBb0012E08.10
  misc_feature (1)..(351): NCBI GI NO: 7441503 NR Description: calnexin - maize (fragment)
  misc_feature (1)..(400): NCBI GI NO: 3334138 NR Description: CALNEXIN HOMOLOG PRECURSOR
  misc_feature (1)..(402): NCBI GI NO: 15240353 NR Description: calnexin 1 (CNX1) [Arabidopsis thaliana]
  misc_feature (1)..(402): NCBI GI NO: 31321896 NR Description: putative papillar cell-specific calnexin
  misc_feature (1)..(400): NCBI GI NO: 11131469 NR Description: Calnexin homolog precursor
  misc_feature (1)..(400): NCBI GI NO: 15240773 NR Description: calnexin, putative [Arabidopsis thaliana]
  misc_feature (1)..(400): NCBI GI NO: 473878 NR Description: calnexin homolog
  misc_feature (1)..(400): NCBI GI NO: 11131766 NR Description: Calnexin homolog precursor
  misc_feature (1)..(404): NCBI GI NO: 18564808 NR Description: calnexin [Aspergillus niger]
  misc_feature (365)..(365): Xaa is any aa, unknown or other

SEQ ID NO: 41581 - DNA, 750 bp, Zea mays subsp. mays
  misc_feature (1)..(750): Ceres Seq. ID no. 12556393
  misc_feature (678)..(678): n is a, c, t, g, unknown, or other
tctctgtggtggagttttacttcctgcacagattccccctgccttttgctggctacctcatcttcatttccatattggctggattctggggccagtgtttggttaggaagatcgtgcatgtgctcaagagagcatcgcttattgtcttcatcctctcctctgttatcttcgtcagtgctcttacgatgggtgtcgttggaacccagaagagcatttcgatgatcaacaatcacgaatatatggggttcctcaacttctgcgagtaactcaaacaccatcagactgtcgatccgtccgggagaatccaggccaatgcctaattgacctcatctccctcaaaatctagaagaataaagtcgccaagtatgtgcacaggttagctcctcgctaacatgtgcgcatttaggccgacagagtcgctgtagtgaattaagctcgtgttagctcctggctaacgagcagaccatatggctttagttttgtggaagtgggcgcgatttcgtcatgtcatgcatgtgttagctgctggctaaccctgcaaatgcgtgtgttggtgcaggtttttgtcacgtctgcgtcagctcctggctgaccagcagttgtttgtcgttcattctctgcgtcagctcctggctgaccagcagttatttgttgttcattcttgcgctagcaccaggntaggctgcaaaactgcaaatatttgttgcatggaacattgtaaatatcagtcaattcccattctgtttgttc

SEQ ID NO: 41582 - protein, 87 aa, Zea mays subsp. mays
  peptide (1)..(87): Ceres Seq. ID no. 12556394
  misc_feature (1)..(86): NCBI GI NO: 30686851 NR Description: expressed protein [Arabidopsis thaliana]
  misc_feature (1)..(87): NCBI GI NO: 30682879 NR Description: expressed protein [Arabidopsis thaliana]
  misc_feature (1)..(87): NCBI GI NO: 25412342 NR Description: hypothetical protein At2g25740
  misc_feature (1)..(87): NCBI GI NO: 16660290 NR Description: hypothetical protein [Musa acuminata]
  misc_feature (1)..(86): NCBI GI NO: 40253412 NR Description: membrane protein-like
  misc_feature (1)..(87): NCBI GI NO: 40253486 NR Description: unknown protein
SVVEFYFLHRFPLPFAGYLIFISILAGFWGQCLVRKIVHVLKRASLIVFILSSVIFVSALTMGVVGTQKSISMINNHEYMGFLNFCE

SEQ ID NO: 41583 - protein, 73 aa, Zea mays subsp. mays
  peptide (1)..(73): Ceres Seq. ID no. 12556395
SLWWSFTSCTDSPCLLLATSSSFPYWLDSGASVWLGRSCMCSREHRLLSSSSPLLSSSVLLRWVSLEPRRAFR

SEQ ID NO: 41584 - DNA, 537 bp, Zea mays subsp. mays
  misc_feature (1)..(537): Ceres Seq. ID no. 2727698
  misc_feature (474)..(474): n is a, c, t, g, unknown, or other
  misc_feature (410)..(410): n is a, c, t, g, unknown, or other
  misc_feature (279)..(279): n is a, c, t, g, unknown, or other
  misc_feature (163)..(163): n is a, c, t, g, unknown, or other
  misc_feature (462)..(462): n is a, c, t, g, unknown, or other
  misc_feature (411)..(411): n is a, c, t, g, unknown, or other
gaaaagaagaacactttctctctgaaatctcaaattcatctcttctcttccgatttcgctgaatcatgtcagacgacgagcatcacttcgaatccagcgacgccggagcttctaagacttatcctcaacaagccggtaacattcgtaaaggtggtcacatcgncatcaagggacgtccctgcaaggtggttgaggtatcgacttcgaagactgggaagcatggtcacgccaagtgtcactttgttgccattgatatctttacttctaagaagcttgaanatatccgtccttcttcccacaattgtgatgttccacatgtgaatcgcgttgattatcagttgattgatatctctgaagatggctttggtagtcttcttactgataatggtagccactaaggatgatctgannctgccaacagatgaacttttactcacacagctcaagaatggatttgagganggtaaggatatngttgtgtctgtcatgctgcatgggaaagagcagatgtgtgctctcaaggaagttggcccaagt

SEQ ID NO: 41585 - protein, 110 aa, Zea mays subsp. mays
  peptide (1)..(110): Ceres Seq. ID no. 2727699
  misc_feature (26)..(62): Pfam Name: Pfam Description:  KOW motif
  misc_feature (1)..(109): NCBI GI NO: 15222317 NR Description: Eukaryotic initiation  factor 5A , putative
  misc_feature (1)..(109): NCBI GI NO: 13937159 NR Description: At1g69410/F10D13.8 [Arabidopsis thaliana]
  misc_feature (1)..(108): NCBI GI NO: 40805177 NR Description: eukaryotic translation initiation factor-5A
  misc_feature (1)..(109): NCBI GI NO: 124226 NR Description: Eukaryotic translation initiation factor 5A-2
  misc_feature (1)..(109): NCBI GI NO: 15223002 NR Description: initiation factor 5A-4; protein id: At1g13950
  misc_feature (1)..(109): NCBI GI NO: 20138664 NR Description: Eukaryotic translation initiation factor 5A-2
  misc_feature (1)..(109): NCBI GI NO: 20138708 NR Description: Eukaryotic translation initiation factor 5A-1
  misc_feature (1)..(108): NCBI GI NO: 9295717 NR Description: T24P13.1 [Arabidopsis thaliana]
  misc_feature (1)..(108): NCBI GI NO: 15222741 NR Description: initiation factor 5A-4, putative
  misc_feature (41)..(109): NCBI GI NO: 8778393 NR Description: F16A14.17 [Arabidopsis thaliana]
  misc_feature (33)..(33): Xaa is any aa, unknown or other
  misc_feature (72)..(72): Xaa is any aa, unknown or other
MSDDEHHFESSDAGASKTYPQQAGNIRKGGHIXIKGRPCKVVEVSTSKTGKHGHAKCHFVAIDIFTSKKLEXIRPSSHNCDVPHVNRVDYQLIDISEDGFGSLLTDNGSH

SEQ ID NO: 41586 - protein, 106 aa, Zea mays subsp. mays
  peptide (1)..(106): Ceres Seq. ID no. 2727700
  misc_feature (55)..(55): Xaa is any aa, unknown or other
  misc_feature (93)..(93): Xaa is any aa, unknown or other
EKKNTFSLKSQIHLFSSDFAESCQTTSITSNPATPELLRLILNKPVTFVKVVTSXSRDVPARWLRYRLRRLGSMVTPSVTLLPLISLLLRSLXISVLLPTIVMFHM

SEQ ID NO: 41587 - protein, 60 aa, Zea mays subsp. mays
  peptide (1)..(60): Ceres Seq. ID no. 2727701
  misc_feature (12)..(59): NCBI GI NO: 15222317 NR Description: Eukaryotic initiation  factor 5A , putative
  misc_feature (12)..(59): NCBI GI NO: 13937159 NR Description: At1g69410/F10D13.8 [Arabidopsis thaliana]
  misc_feature (13)..(58): NCBI GI NO: 40805177 NR Description: eukaryotic translation initiation factor-5A
  misc_feature (13)..(59): NCBI GI NO: 124226 NR Description: Eukaryotic translation initiation factor 5A-2
  misc_feature (12)..(59): NCBI GI NO: 15223002 NR Description: initiation factor 5A-4; protein id: At1g13950
  misc_feature (12)..(59): NCBI GI NO: 20138664 NR Description: Eukaryotic translation initiation factor 5A-2
  misc_feature (13)..(59): NCBI GI NO: 20138708 NR Description: Eukaryotic translation initiation factor 5A-1
  misc_feature (13)..(58): NCBI GI NO: 9295717 NR Description: T24P13.1 [Arabidopsis thaliana]
  misc_feature (13)..(58): NCBI GI NO: 15222741 NR Description: initiation factor 5A-4, putative
  misc_feature (12)..(59): NCBI GI NO: 8778393 NR Description: F16A14.17 [Arabidopsis thaliana]
  misc_feature (18)..(18): Xaa is any aa, unknown or other
  misc_feature (35)..(35): Xaa is any aa, unknown or other
  misc_feature (39)..(39): Xaa is any aa, unknown or other
MALVVFLLIMVATKDDLXLPTDELLLTQLKNGFEXGKDXVVSVMLHGKEQMCALKEVGPS

SEQ ID NO: 41588 - DNA, 686 bp, Zea mays subsp. mays
  misc_feature (1)..(686): Ceres Seq. ID no. 12556415
  misc_feature (616)..(616): n is a, c, t, g, unknown, or other
aaacacaggagatatagctgaaagcagtgagcaagtggggcattactggctagagctgggaaggcgatccaagtaccagttgcacatggtgatagccatactgtcatacatcctcttcgggctgctgccaccagtcatctacggactgtcattcaggacgagcgacaacagagagaacaaagtgctggtggtcgctgctgcatctctcctgtgcattgcgctgctcgcaatcgggaaggcacatgttaagaggcataggacatacctcacaaaccctcctctactacctgtccattggattcagcagctccggactgtcgtacgtcgcaggcgtcctcctcgcgaaggtcctagcacacttcggtatcattgatcagggtggtgcatcaagctcctgctcctccaggtctctcattccctgaagcagccgcctgggcttcctactgagactggagccctcatttagtagttttgatggttaaatggattatctcagcacacatctgcatggagacactatcttgcaattcacacagtttttatcacaagcccttggctctcagaattcgtctctcttttttcacagcacttggccatagtataattttcagaattngtctgtaccccaaccttgtcatcgtatttttgacaggaacatgttgtcaattacaatctccttttttcac

SEQ ID NO: 41589 - protein, 123 aa, Zea mays subsp. mays
  peptide (1)..(123): Ceres Seq. ID no. 12556416
  misc_feature (3)..(89): NCBI GI NO: 24413974 NR Description: contains ESTs C71658
  misc_feature (1)..(89): NCBI GI NO: 18417079 NR Description: putative protein; protein id: At4g27860
  misc_feature (1)..(89): NCBI GI NO: 7487470 NR Description: hypothetical protein T27E11
  misc_feature (10)..(89): NCBI GI NO: 15912253 NR Description: AT4g27870/T27E11_110 [Arabidopsis thaliana]
  misc_feature (10)..(89): NCBI GI NO: 7487471 NR Description: hypothetical protein T27E11
  misc_feature (10)..(89): NCBI GI NO: 30687764 NR Description: expressed protein [Arabidopsis thaliana]
  misc_feature (1)..(84): NCBI GI NO: 21592516 NR Description: unknown [Arabidopsis thaliana]
  misc_feature (1)..(84): NCBI GI NO: 30689371 NR Description: expressed protein [Arabidopsis thaliana]
  misc_feature (1)..(84): NCBI GI NO: 30689367 NR Description: expressed protein [Arabidopsis thaliana]
NTGDIAESSEQVGHYWLELGRRSKYQLHMVIAILSYILFGLLPPVIYGLSFRTSDNRENKVLVVAAASLLCIALLAIGKAHVKRHRTYLTNPPLLPVHWIQQLRTVVRRRRPPREGPSTLRYH

SEQ ID NO: 41590 - protein, 95 aa, Zea mays subsp. mays
  peptide (1)..(95): Ceres Seq. ID no. 12556417
  misc_feature (1)..(61): NCBI GI NO: 24413974 NR Description: contains ESTs C71658
  misc_feature (1)..(61): NCBI GI NO: 18417079 NR Description: putative protein; protein id: At4g27860
  misc_feature (1)..(61): NCBI GI NO: 7487470 NR Description: hypothetical protein T27E11
  misc_feature (1)..(61): NCBI GI NO: 15912253 NR Description: AT4g27870/T27E11_110 [Arabidopsis thaliana]
  misc_feature (1)..(61): NCBI GI NO: 7487471 NR Description: hypothetical protein T27E11
  misc_feature (1)..(61): NCBI GI NO: 30687764 NR Description: expressed protein [Arabidopsis thaliana]
  misc_feature (1)..(56): NCBI GI NO: 21592516 NR Description: unknown [Arabidopsis thaliana]
  misc_feature (1)..(56): NCBI GI NO: 30689371 NR Description: expressed protein [Arabidopsis thaliana]
  misc_feature (1)..(56): NCBI GI NO: 30689367 NR Description: expressed protein [Arabidopsis thaliana]
MVIAILSYILFGLLPPVIYGLSFRTSDNRENKVLVVAAASLLCIALLAIGKAHVKRHRTYLTNPPLLPVHWIQQLRTVVRRRRPPREGPSTLRYH

SEQ ID NO: 41591 - protein, 70 aa, Zea mays subsp. mays
  peptide (1)..(70): Ceres Seq. ID no. 12556418
  misc_feature (48)..(48): Xaa is any aa, unknown or other
MVKWIISAHICMETLSCNSHSFYHKPLALRIRLSFFTALGHSIIFRIXLYPNLVIVFLTGTCCQLQSPFF

SEQ ID NO: 41592 - DNA, 1315 bp, Zea mays subsp. mays; identical to SEQ ID NO: 35930
  misc_feature (1)..(1315): Ceres Seq. ID no. 13635214
  misc_feature (398)..(398): n is a, c, t, g, unknown, or other
  misc_feature (397)..(397): n is a, c, t, g, unknown, or other
  misc_feature (399)..(399): n is a, c, t, g, unknown, or other

SEQ ID NO: 41593 - protein, 153 aa, Zea mays subsp. mays; identical to SEQ ID NO: 35931
  peptide (1)..(153): Ceres Seq. ID no. 15220341
  misc_feature (38)..(152): Pfam Name: Pfam Description:  lactate/malate dehydrogenase
  misc_feature (36)..(152): NCBI GI NO: 18202485 NR Description: Malate dehydrogenase, cytoplasmic
  misc_feature (36)..(152): NCBI GI NO: 37535388 NR Description: cytoplasmic malate dehydrogenase
  misc_feature (36)..(152): NCBI GI NO: 10334493 NR Description: cytosolic malate dehydrogenase [Cicer arietinum]
  misc_feature (36)..(152): NCBI GI NO: 15982948 NR Description: NAD-dependent malate dehydrogenase
  misc_feature (36)..(152): NCBI GI NO: 10798652 NR Description: malate dehydrogenase [Nicotiana tabacum]
  misc_feature (36)..(152): NCBI GI NO: 11133373 NR Description: Malate dehydrogenase, cytoplasmic
  misc_feature (36)..(152): NCBI GI NO: 12229778 NR Description: Malate dehydrogenase, cytoplasmic
  misc_feature (36)..(152): NCBI GI NO: 15219721 NR Description: malate dehydrogenase, cytosolic, putative
  misc_feature (36)..(152): NCBI GI NO: 15239843 NR Description: malate dehydrogenase, cytosolic, putative
  misc_feature (36)..(152): NCBI GI NO: 21593565 NR Description: cytosolic malate dehydrogenase
  misc_feature (10)..(10): Xaa is any aa, unknown or other
  misc_feature (11)..(11): Xaa is any aa, unknown or other
  misc_feature (26)..(26): Xaa is any aa, unknown or other
  misc_feature (27)..(27): Xaa is any aa, unknown or other
  misc_feature (29)..(29): Xaa is any aa, unknown or other
  misc_feature (30)..(30): Xaa is any aa, unknown or other
  misc_feature (32)..(32): Xaa is any aa, unknown or other
  misc_feature (33)..(33): Xaa is any aa, unknown or other
  misc_feature (34)..(34): Xaa is any aa, unknown or other
  misc_feature (40)..(40): Xaa is any aa, unknown or other
  misc_feature (47)..(47): Xaa is any aa, unknown or other
  misc_feature (50)..(50): Xaa is any aa, unknown or other
  misc_feature (55)..(55): Xaa is any aa, unknown or other
  misc_feature (56)..(56): Xaa is any aa, unknown or other
  misc_feature (63)..(63): Xaa is any aa, unknown or other
  misc_feature (78)..(78): Xaa is any aa, unknown or other
  misc_feature (87)..(87): Xaa is any aa, unknown or other
  misc_feature (93)..(93): Xaa is any aa, unknown or other
  misc_feature (97)..(97): Xaa is any aa, unknown or other
  misc_feature (104)..(104): Xaa is any aa, unknown or other
  misc_feature (106)..(106): Xaa is any aa, unknown or other
  misc_feature (117)..(117): Xaa is any aa, unknown or other
  misc_feature (118)..(118): Xaa is any aa, unknown or other
  misc_feature (123)..(123): Xaa is any aa, unknown or other
  misc_feature (132)..(132): Xaa is any aa, unknown or other
  misc_feature (133)..(133): Xaa is any aa, unknown or other
  misc_feature (140)..(140): Xaa is any aa, unknown or other
  misc_feature (148)..(148): Xaa is any aa, unknown or other

SEQ ID NO: 41594 - protein, 143 aa, Zea mays subsp. mays; identical to SEQ ID NO: 35932
  peptide (1)..(143): Ceres Seq. ID no. 15220342
  misc_feature (85)..(142): Pfam Name: Pfam Description:  lactate/malate dehydrogenase
  misc_feature (6)..(142): NCBI GI NO: 18202485 NR Description: Malate dehydrogenase, cytoplasmic
  misc_feature (6)..(142): NCBI GI NO: 37535388 NR Description: cytoplasmic malate dehydrogenase
  misc_feature (6)..(142): NCBI GI NO: 21593565 NR Description: cytosolic malate dehydrogenase
  misc_feature (6)..(142): NCBI GI NO: 15239843 NR Description: malate dehydrogenase, cytosolic, putative
  misc_feature (6)..(142): NCBI GI NO: 15982948 NR Description: NAD-dependent malate dehydrogenase
  misc_feature (6)..(142): NCBI GI NO: 10798652 NR Description: malate dehydrogenase [Nicotiana tabacum]
  misc_feature (6)..(142): NCBI GI NO: 10334493 NR Description: cytosolic malate dehydrogenase [Cicer arietinum]
  misc_feature (6)..(142): NCBI GI NO: 15219721 NR Description: malate dehydrogenase, cytosolic, putative
  misc_feature (6)..(142): NCBI GI NO: 11133373 NR Description: Malate dehydrogenase, cytoplasmic
  misc_feature (6)..(142): NCBI GI NO: 12229778 NR Description: Malate dehydrogenase, cytoplasmic
  misc_feature (8)..(8): Xaa is any aa, unknown or other
  misc_feature (9)..(9): Xaa is any aa, unknown or other
  misc_feature (15)..(15): Xaa is any aa, unknown or other
  misc_feature (24)..(24): Xaa is any aa, unknown or other
  misc_feature (25)..(25): Xaa is any aa, unknown or other
  misc_feature (32)..(32): Xaa is any aa, unknown or other
  misc_feature (39)..(39): Xaa is any aa, unknown or other
  misc_feature (49)..(49): Xaa is any aa, unknown or other
  misc_feature (50)..(50): Xaa is any aa, unknown or other
  misc_feature (62)..(62): Xaa is any aa, unknown or other
  misc_feature (75)..(75): Xaa is any aa, unknown or other
  misc_feature (77)..(77): Xaa is any aa, unknown or other
  misc_feature (78)..(78): Xaa is any aa, unknown or other
  misc_feature (79)..(79): Xaa is any aa, unknown or other
  misc_feature (86)..(86): Xaa is any aa, unknown or other
  misc_feature (101)..(101): Xaa is any aa, unknown or other
  misc_feature (104)..(104): Xaa is any aa, unknown or other
  misc_feature (119)..(119): Xaa is any aa, unknown or other

SEQ ID NO: 41595 - protein, 130 aa, Zea mays subsp. mays; identical to SEQ ID NO: 35933
  peptide (1)..(130): Ceres Seq. ID no. 15220343
  misc_feature (72)..(129): Pfam Name: Pfam Description:  lactate/malate dehydrogenase
  misc_feature (1)..(129): NCBI GI NO: 18202485 NR Description: Malate dehydrogenase, cytoplasmic
  misc_feature (1)..(129): NCBI GI NO: 37535388 NR Description: cytoplasmic malate dehydrogenase
  misc_feature (1)..(129): NCBI GI NO: 21593565 NR Description: cytosolic malate dehydrogenase
  misc_feature (1)..(129): NCBI GI NO: 15239843 NR Description: malate dehydrogenase, cytosolic, putative
  misc_feature (1)..(129): NCBI GI NO: 15982948 NR Description: NAD-dependent malate dehydrogenase
  misc_feature (1)..(129): NCBI GI NO: 10798652 NR Description: malate dehydrogenase [Nicotiana tabacum]
  misc_feature (1)..(129): NCBI GI NO: 10334493 NR Description: cytosolic malate dehydrogenase [Cicer arietinum]
  misc_feature (1)..(129): NCBI GI NO: 15219721 NR Description: malate dehydrogenase, cytosolic, putative
  misc_feature (1)..(129): NCBI GI NO: 11133373 NR Description: Malate dehydrogenase, cytoplasmic
  misc_feature (1)..(129): NCBI GI NO: 12229778 NR Description: Malate dehydrogenase, cytoplasmic
  misc_feature (2)..(2): Xaa is any aa, unknown or other
  misc_feature (11)..(11): Xaa is any aa, unknown or other
  misc_feature (12)..(12): Xaa is any aa, unknown or other
  misc_feature (19)..(19): Xaa is any aa, unknown or other
  misc_feature (26)..(26): Xaa is any aa, unknown or other
  misc_feature (36)..(36): Xaa is any aa, unknown or other
  misc_feature (37)..(37): Xaa is any aa, unknown or other
  misc_feature (49)..(49): Xaa is any aa, unknown or other
  misc_feature (62)..(62): Xaa is any aa, unknown or other
  misc_feature (64)..(64): Xaa is any aa, unknown or other
  misc_feature (65)..(65): Xaa is any aa, unknown or other
  misc_feature (66)..(66): Xaa is any aa, unknown or other
  misc_feature (73)..(73): Xaa is any aa, unknown or other
  misc_feature (88)..(88): Xaa is any aa, unknown or other
  misc_feature (91)..(91): Xaa is any aa, unknown or other
  misc_feature (106)..(106): Xaa is any aa, unknown or other

SEQ ID NO: 41596 - DNA, 355 bp, Zea mays subsp. mays
  misc_feature (1)..(355): Ceres Seq. ID no. 2727880
  misc_feature (266)..(266): n is a, c, t, g, unknown, or other
gcacctaacgcagattcttcttctctaccatattcgttgaaaccagagaagatggtgggtgtgtcgccgaagatcgctccgtcgatgttgtcatcggactttgcaaatcttgccgcggaggctaagcggatgatcgatttgggcgccaattggcttcacatggacattatggacgggcattttgtttctaacctaacgattggtgctcctgtcatcgagagtttgaggaagcacacaaatgcatatcttgattgccacttaatggngacgaaccccatggattatgtggatcagatggctaaagctggggcgtctggtttcacattccacgttgaggtggcccaagagaattggc

SEQ ID NO: 41597 - protein, 118 aa, Zea mays subsp. mays
  peptide (1)..(118): Ceres Seq. ID no. 2727881
  misc_feature (24)..(117): Pfam Name: Pfam Description:  Ribulose-phosphate 3 epimerase family
  misc_feature (18)..(117): NCBI GI NO: 15221735 NR Description: putative D-ribulose-5-phosphate-3-epimerase
  misc_feature (21)..(117): NCBI GI NO: 18395962 NR Description: putative D-ribulose-5-phosphate 3-epimerase
  misc_feature (21)..(117): NCBI GI NO: 6091725 NR Description: putative D-ribulose-5-phosphate 3-epimerase
  misc_feature (24)..(117): NCBI GI NO: 28373310 NR Description: Chain A
  misc_feature (25)..(112): NCBI GI NO: 39581355 NR Description: Hypothetical protein CBG15299
  misc_feature (23)..(112): NCBI GI NO: 17552948 NR Description: D-ribulose-5-Phosphate 3-epimerase (24.4 kD)
  misc_feature (21)..(116): NCBI GI NO: 6322341 NR Description: D-ribulose-5-Phosphate 3-epimerase; Rpe1p
  misc_feature (21)..(117): NCBI GI NO: 19114917 NR Description: putative ribulose phosphate 3-epimerase
  misc_feature (24)..(117): NCBI GI NO: 27532955 NR Description: RIKEN cDNA 5730518J08 [Mus musculus]
  misc_feature (25)..(112): NCBI GI NO: 29248724 NR Description: GLP_164_20691_19966 [Giardia lamblia ATCC 50803]
  misc_feature (89)..(89): Xaa is any aa, unknown or other
APNADSSSLPYSLKPEKMVGVSPKIAPSMLSSDFANLAAEAKRMIDLGANWLHMDIMDGHFVSNLTIGAPVIESLRKHTNAYLDCHLMXTNPMDYVDQMAKAGASGFTFHVEVAQENW

SEQ ID NO: 41598 - protein, 101 aa, Zea mays subsp. mays
  peptide (1)..(101): Ceres Seq. ID no. 2727882
  misc_feature (7)..(100): Pfam Name: Pfam Description:  Ribulose-phosphate 3 epimerase family
  misc_feature (1)..(100): NCBI GI NO: 15221735 NR Description: putative D-ribulose-5-phosphate-3-epimerase
  misc_feature (4)..(100): NCBI GI NO: 18395962 NR Description: putative D-ribulose-5-phosphate 3-epimerase
  misc_feature (4)..(100): NCBI GI NO: 6091725 NR Description: putative D-ribulose-5-phosphate 3-epimerase
  misc_feature (7)..(100): NCBI GI NO: 28373310 NR Description: Chain A
  misc_feature (8)..(95): NCBI GI NO: 39581355 NR Description: Hypothetical protein CBG15299
  misc_feature (6)..(95): NCBI GI NO: 17552948 NR Description: D-ribulose-5-Phosphate 3-epimerase (24.4 kD)
  misc_feature (4)..(99): NCBI GI NO: 6322341 NR Description: D-ribulose-5-Phosphate 3-epimerase; Rpe1p
  misc_feature (4)..(100): NCBI GI NO: 19114917 NR Description: putative ribulose phosphate 3-epimerase
  misc_feature (7)..(100): NCBI GI NO: 27532955 NR Description: RIKEN cDNA 5730518J08 [Mus musculus]
  misc_feature (8)..(95): NCBI GI NO: 29248724 NR Description: GLP_164_20691_19966 [Giardia lamblia ATCC 50803]
  misc_feature (72)..(72): Xaa is any aa, unknown or other
MVGVSPKIAPSMLSSDFANLAAEAKRMIDLGANWLHMDIMDGHFVSNLTIGAPVIESLRKHTNAYLDCHLMXTNPMDYVDQMAKAGASGFTFHVEVAQENW

SEQ ID NO: 41599 - protein, 90 aa, Zea mays subsp. mays
  peptide (1)..(90): Ceres Seq. ID no. 2727883
  misc_feature (1)..(89): Pfam Name: Pfam Description:  Ribulose-phosphate 3 epimerase family
  misc_feature (1)..(89): NCBI GI NO: 15221735 NR Description: putative D-ribulose-5-phosphate-3-epimerase
  misc_feature (1)..(89): NCBI GI NO: 18395962 NR Description: putative D-ribulose-5-phosphate 3-epimerase
  misc_feature (1)..(89): NCBI GI NO: 6091725 NR Description: putative D-ribulose-5-phosphate 3-epimerase
  misc_feature (1)..(89): NCBI GI NO: 28373310 NR Description: Chain A
  misc_feature (1)..(84): NCBI GI NO: 39581355 NR Description: Hypothetical protein CBG15299
  misc_feature (1)..(84): NCBI GI NO: 17552948 NR Description: D-ribulose-5-Phosphate 3-epimerase (24.4 kD)
  misc_feature (1)..(88): NCBI GI NO: 6322341 NR Description: D-ribulose-5-Phosphate 3-epimerase; Rpe1p
  misc_feature (1)..(89): NCBI GI NO: 19114917 NR Description: putative ribulose phosphate 3-epimerase
  misc_feature (1)..(89): NCBI GI NO: 27532955 NR Description: RIKEN cDNA 5730518J08 [Mus musculus]
  misc_feature (1)..(84): NCBI GI NO: 29248724 NR Description: GLP_164_20691_19966 [Giardia lamblia ATCC 50803]
  misc_feature (61)..(61): Xaa is any aa, unknown or other
MLSSDFANLAAEAKRMIDLGANWLHMDIMDGHFVSNLTIGAPVIESLRKHTNAYLDCHLMXTNPMDYVDQMAKAGASGFTFHVEVAQENW

SEQ ID NO: 41600 - DNA, 553 bp, Zea mays subsp. mays
  misc_feature (1)..(553): Ceres Seq. ID no. 12556468
aaacacaggagatatagctgaaagcagtgagcaagtggggcattactggctagagctgggaaggcgatccaagtaccagttgcacatggtgatagccatactgtcatacatcctcttcgggctgctgccaccagtcatctacggactgtcattcaggacgagcgacaacagagagaacaaagtgctggtggtcgctgctgcatctctcctgtgcattgcgctgctcgcaatcgggaaggcacatgttaagaggcataggacatacctcacaaccctcctctactacctgtccattggattcagcagctccggactgtcgtacgtcgcaggcgtcctcctcgcgaaggtcctagcacacttcggtatcattgatcagggtggtgcatcagctcctgctcctccaggtctctcattccctgaagcagccgtagggcttcaaactgagactggagccctcatttagtagttttgatggataaatggattatctcagcacacatctgcatggagacactatctgcaattcacacagtttttatcacagcccatggat

SEQ ID NO: 41601 - protein, 153 aa, Zea mays subsp. mays
  peptide (1)..(153): Ceres Seq. ID no. 12556469
  misc_feature (3)..(123): NCBI GI NO: 24413974 NR Description: contains ESTs C71658
  misc_feature (10)..(131): NCBI GI NO: 15912253 NR Description: AT4g27870/T27E11_110 [Arabidopsis thaliana]
  misc_feature (10)..(131): NCBI GI NO: 7487471 NR Description: hypothetical protein T27E11
  misc_feature (10)..(131): NCBI GI NO: 30687764 NR Description: expressed protein [Arabidopsis thaliana]
  misc_feature (1)..(124): NCBI GI NO: 18417079 NR Description: putative protein; protein id: At4g27860
  misc_feature (1)..(124): NCBI GI NO: 7487470 NR Description: hypothetical protein T27E11
  misc_feature (1)..(131): NCBI GI NO: 30689371 NR Description: expressed protein [Arabidopsis thaliana]
  misc_feature (1)..(131): NCBI GI NO: 21592516 NR Description: unknown [Arabidopsis thaliana]
  misc_feature (1)..(131): NCBI GI NO: 30689367 NR Description: expressed protein [Arabidopsis thaliana]
NTGDIAESSEQVGHYWLELGRRSKYQLHMVIAILSYILFGLLPPVIYGLSFRTSDNRENKVLVVAAASLLCIALLAIGKAHVKRHRTYLTTLLYYLSIGFSSSGLSYVAGVLLAKVLAHFGIIDQGGASAPAPPGLSFPEAAVGLQTETGALI

SEQ ID NO: 41602 - protein, 125 aa, Zea mays subsp. mays
  peptide (1)..(125): Ceres Seq. ID no. 12556470
  misc_feature (1)..(95): NCBI GI NO: 24413974 NR Description: contains ESTs C71658
  misc_feature (1)..(103): NCBI GI NO: 15912253 NR Description: AT4g27870/T27E11_110 [Arabidopsis thaliana]
  misc_feature (1)..(103): NCBI GI NO: 7487471 NR Description: hypothetical protein T27E11
  misc_feature (1)..(103): NCBI GI NO: 30687764 NR Description: expressed protein [Arabidopsis thaliana]
  misc_feature (1)..(96): NCBI GI NO: 18417079 NR Description: putative protein; protein id: At4g27860
  misc_feature (1)..(96): NCBI GI NO: 7487470 NR Description: hypothetical protein T27E11
  misc_feature (1)..(103): NCBI GI NO: 30689371 NR Description: expressed protein [Arabidopsis thaliana]
  misc_feature (1)..(103): NCBI GI NO: 21592516 NR Description: unknown [Arabidopsis thaliana]
  misc_feature (1)..(103): NCBI GI NO: 30689367 NR Description: expressed protein [Arabidopsis thaliana]
MVIAILSYILFGLLPPVIYGLSFRTSDNRENKVLVVAAASLLCIALLAIGKAHVKRHRTYLTTLLYYLSIGFSSSGLSYVAGVLLAKVLAHFGIIDQGGASAPAPPGLSFPEAAVGLQTETGALI

SEQ ID NO: 41603 - DNA, 435 bp, Zea mays subsp. mays
  misc_feature (1)..(435): Ceres Seq. ID no. 2732244
gtcgcattccgcaacacctgctcctcgcccccttctctcagaggcgacgcctcgggcgctcctaccctgccccgtctccggtccccccgcgccgtcggcgaggcagccggccgtcacagaagcccgatccggaccccgcgagaatgaagacatccagttgcgtctaaactccattagaagactttcaacaattgcacgggctcttggagaagaaagaaccaggaaggagctgattccttttcttagtgaaaacaacgatgatgaagacgaggtgcttcttgcaatggctgaggaattgggtgtgttcattccgtatgttggtggtgtagaacatgctcatgttttgctcccacctttggagacattgtgtacagtggaggaaacttgtgtccgtgataaagcagttgaatctctgtgccgtattggtgccaaatg

SEQ ID NO: 41604 - protein, 144 aa, Zea mays subsp. mays
  peptide (1)..(144): Ceres Seq. ID no. 2732245
  misc_feature (108)..(143): Pfam Name: Pfam Description:  HEAT repeat
  misc_feature (47)..(143): NCBI GI NO: 5679684 NR Description: phosphatase 2A regulatory A subunit [Oryza sativa]
  misc_feature (47)..(143): NCBI GI NO: 11094367 NR Description: Ser/Thr specific protein phosphatase 2A Aregulatory subunit beta isoform
  misc_feature (47)..(143): NCBI GI NO: 1076389 NR Description: phospho protein phosphatase 2A 65K regulatory chainhomolog pDF1
  misc_feature (47)..(143): NCBI GI NO: 15230896 NR Description: protein phosphatase 2A 65 kDa regulatory subunit
  misc_feature (47)..(143): NCBI GI NO: 11094365 NR Description: Ser/Thr specific protein phosphatase 2A Aregulatory subunit alpha isoform
  misc_feature (47)..(143): NCBI GI NO: 1254996 NR Description: serine/threonine protein phosphatase type 2Aregulatory subunit A
  misc_feature (47)..(143): NCBI GI NO: 2146743 NR Description: phosphoprotein phosphatase (EC 3
  misc_feature (47)..(143): NCBI GI NO: 15222601 NR Description: phosphoprotein phosphatase 2A, regulatory subunitA
  misc_feature (47)..(143): NCBI GI NO: 1076396 NR Description: phospho protein phosphatase 2A 65K regulatory chainhomolog regA
  misc_feature (47)..(143): NCBI GI NO: 683506 NR Description: 65 kDa regulatory subunit of protein phosphatase 2A
SHSATPAPRPLLSEATPRALLPCPVSGPPAPSARQPAVTEARSGPRENEDIQLRLNSIRRLSTIARALGEERTRKELIPFLSENNDDEDEVLLAMAEELGVFIPYVGGVEHAHVLLPPLETLCTVEETCVRDKAVESLCRIGAK

SEQ ID NO: 41605 - protein, 50 aa, Zea mays subsp. mays
  peptide (1)..(50): Ceres Seq. ID no. 4903276
  misc_feature (14)..(49): Pfam Name: Pfam Description:  HEAT repeat
  misc_feature (1)..(49): NCBI GI NO: 5679684 NR Description: phosphatase 2A regulatory A subunit [Oryza sativa]
  misc_feature (1)..(49): NCBI GI NO: 11094367 NR Description: Ser/Thr specific protein phosphatase 2A Aregulatory subunit beta isoform
  misc_feature (1)..(49): NCBI GI NO: 1076389 NR Description: phospho protein phosphatase 2A 65K regulatory chainhomolog pDF1
  misc_feature (1)..(49): NCBI GI NO: 15230896 NR Description: protein phosphatase 2A 65 kDa regulatory subunit
  misc_feature (1)..(49): NCBI GI NO: 11094365 NR Description: Ser/Thr specific protein phosphatase 2A Aregulatory subunit alpha isoform
  misc_feature (1)..(49): NCBI GI NO: 1254996 NR Description: serine/threonine protein phosphatase type 2Aregulatory subunit A
  misc_feature (1)..(49): NCBI GI NO: 15222601 NR Description: phosphoprotein phosphatase 2A, regulatory subunitA
  misc_feature (1)..(49): NCBI GI NO: 2146743 NR Description: phosphoprotein phosphatase (EC 3
  misc_feature (1)..(49): NCBI GI NO: 1076396 NR Description: phospho protein phosphatase 2A 65K regulatory chainhomolog regA
  misc_feature (1)..(49): NCBI GI NO: 683506 NR Description: 65 kDa regulatory subunit of protein phosphatase 2A
MAEELGVFIPYVGGVEHAHVLLPPLETLCTVEETCVRDKAVESLCRIGAK

SEQ ID NO: 41606 - DNA, 868 bp, Zea mays subsp. mays; identical to SEQ ID NO: 39793
  misc_feature (1)..(868): Ceres Seq. ID no. 12358010

SEQ ID NO: 41607 - protein, 189 aa, Zea mays subsp. mays; identical to SEQ ID NO: 39794
  peptide (1)..(189): Ceres Seq. ID no. 12358011
  misc_feature (48)..(102): Pfam Name: Pfam Description:  Homeobox domain
  misc_feature (1)..(186): NCBI GI NO: 5006853 NR Description: homeodomain leucine zipper protein [Oryza sativa]
  misc_feature (20)..(188): NCBI GI NO: 33943626 NR Description: homeodomain leucine-zipper protein Hox8
  misc_feature (20)..(188): NCBI GI NO: 37533686 NR Description: putative homeodomain leucine zipper protein
  misc_feature (3)..(184): NCBI GI NO: 18034439 NR Description: homeodomain leucine zipper protein CPHB-4
  misc_feature (41)..(154): NCBI GI NO: 34902432 NR Description: Unknown protein
  misc_feature (36)..(164): NCBI GI NO: 22651698 NR Description: homeodomain protein Hfi22 [Nicotiana tabacum]
  misc_feature (10)..(188): NCBI GI NO: 8133126 NR Description: hb-6-like protein
  misc_feature (26)..(159): NCBI GI NO: 5305602 NR Description: homeobox protein ATHB6 [Arabidopsis thaliana]
  misc_feature (26)..(159): NCBI GI NO: 25386231 NR Description: homeodomain transcription factor (ATHB-6)
  misc_feature (26)..(159): NCBI GI NO: 18399966 NR Description: homeodomain transcription factor

SEQ ID NO: 41608 - protein, 176 aa, Zea mays subsp. mays; identical to SEQ ID NO: 39795
  peptide (1)..(176): Ceres Seq. ID no. 12358012
  misc_feature (35)..(89): Pfam Name: Pfam Description:  Homeobox domain
  misc_feature (1)..(173): NCBI GI NO: 5006853 NR Description: homeodomain leucine zipper protein [Oryza sativa]
  misc_feature (7)..(175): NCBI GI NO: 33943626 NR Description: homeodomain leucine-zipper protein Hox8
  misc_feature (7)..(175): NCBI GI NO: 37533686 NR Description: putative homeodomain leucine zipper protein
  misc_feature (1)..(171): NCBI GI NO: 18034439 NR Description: homeodomain leucine zipper protein CPHB-4
  misc_feature (28)..(141): NCBI GI NO: 34902432 NR Description: Unknown protein
  misc_feature (23)..(151): NCBI GI NO: 22651698 NR Description: homeodomain protein Hfi22 [Nicotiana tabacum]
  misc_feature (1)..(175): NCBI GI NO: 8133126 NR Description: hb-6-like protein
  misc_feature (13)..(146): NCBI GI NO: 5305602 NR Description: homeobox protein ATHB6 [Arabidopsis thaliana]
  misc_feature (13)..(146): NCBI GI NO: 18399966 NR Description: homeodomain transcription factor
  misc_feature (13)..(146): NCBI GI NO: 25386231 NR Description: homeodomain transcription factor (ATHB-6)

SEQ ID NO: 41609 - protein, 163 aa, Zea mays subsp. mays; identical to SEQ ID NO: 39796
  peptide (1)..(163): Ceres Seq. ID no. 12358013
  misc_feature (22)..(76): Pfam Name: Pfam Description:  Homeobox domain
  misc_feature (1)..(160): NCBI GI NO: 5006853 NR Description: homeodomain leucine zipper protein [Oryza sativa]
  misc_feature (1)..(162): NCBI GI NO: 33943626 NR Description: homeodomain leucine-zipper protein Hox8
  misc_feature (1)..(162): NCBI GI NO: 37533686 NR Description: putative homeodomain leucine zipper protein
  misc_feature (1)..(158): NCBI GI NO: 18034439 NR Description: homeodomain leucine zipper protein CPHB-4
  misc_feature (15)..(128): NCBI GI NO: 34902432 NR Description: Unknown protein
  misc_feature (10)..(138): NCBI GI NO: 22651698 NR Description: homeodomain protein Hfi22 [Nicotiana tabacum]
  misc_feature (1)..(162): NCBI GI NO: 8133126 NR Description: hb-6-like protein
  misc_feature (1)..(133): NCBI GI NO: 5305602 NR Description: homeobox protein ATHB6 [Arabidopsis thaliana]
  misc_feature (1)..(133): NCBI GI NO: 18399966 NR Description: homeodomain transcription factor
  misc_feature (1)..(133): NCBI GI NO: 25386231 NR Description: homeodomain transcription factor (ATHB-6)

SEQ ID NO: 41610 - DNA, 570 bp, Zea mays subsp. mays
  misc_feature (1)..(570): Ceres Seq. ID no. 12378176
  misc_feature (554)..(554): n is a, c, t, g, unknown, or other
  misc_feature (552)..(552): n is a, c, t, g, unknown, or other
  misc_feature (553)..(553): n is a, c, t, g, unknown, or other
  misc_feature (551)..(551): n is a, c, t, g, unknown, or other
tgcatgtttgaagggtctgaatggagttccagacattgtagagtgctcttttgtgcaatcaactgtgacagagttgccattctttgcctccaaggttcggctcggcaagaatggagtggaggaagtgcttggtctgggtgagctcaacgagttcgagaagaagggtctggaaaacctcaagggcgagctcaagtcttccatcgacaagggtatcaagtttgcccacgggaactaggcaccttgcccggcttctaacaattgatgccccttgcatttttgtttgactgcctatttttcctgccccccgtatggttggggcaatgaggcgtagtggtcgataataaaacccagcggaacaaagaaaacgtgtaccagaaactgtttgcaaacaccggtgccttttttttgtgttgaaccaccattagttgagccgtgagggaatggtgaacaagctttccacttgctcatttccgagcgcttctctttgattgtatccatggtttggactcatgactgtacgtcttggcagttggcttggcacccaggaatcnnnncactggagttgctgcc

SEQ ID NO: 41611 - protein, 77 aa, Zea mays subsp. mays
  peptide (1)..(77): Ceres Seq. ID no. 12378177
  misc_feature (1)..(74): Pfam Name: Pfam Description:  lactate/malate dehydrogenase
  misc_feature (1)..(75): NCBI GI NO: 34911788 NR Description: putative malate dehydrogenase
  misc_feature (1)..(77): NCBI GI NO: 21388544 NR Description: putative mitochondrial NAD-dependent malatedehydrogenase
  misc_feature (1)..(77): NCBI GI NO: 21388546 NR Description: putative mitochondrial NAD-dependent malatedehydrogenase
  misc_feature (1)..(77): NCBI GI NO: 21388552 NR Description: putative mitochondrial NAD-dependent malatedehydrogenase
  misc_feature (1)..(75): NCBI GI NO: 15232468 NR Description: mitochondrial NAD-dependent malate dehydrogenase
  misc_feature (1)..(75): NCBI GI NO: 7431174 NR Description: malate dehydrogenase (EC 1
  misc_feature (1)..(75): NCBI GI NO: 7769871 NR Description: F12M16.14 [Arabidopsis thaliana]
  misc_feature (1)..(75): NCBI GI NO: 18404382 NR Description: mitochondrial NAD-dependent malate dehydrogenase
  misc_feature (1)..(75): NCBI GI NO: 21592905 NR Description: mitochondrial NAD-dependent malate dehydrogenase
  misc_feature (1)..(77): NCBI GI NO: 126896 NR Description: MALATE DEHYDROGENASE, MITOCHONDRIAL PRECURSOR
ACLKGLNGVPDIVECSFVQSTVTELPFFASKVRLGKNGVEEVLGLGELNEFEKKGLENLKGELKSSIDKGIKFAHGN

SEQ ID NO: 41612 - protein, 57 aa, Zea mays subsp. mays
  peptide (1)..(57): Ceres Seq. ID no. 12378178
MEWRKCLVWVSSTSSRRRVWKTSRASSSLPSTRVSSLPTGTRHLARLLTIDAPCIFV

SEQ ID NO: 41613 - protein, 46 aa, Zea mays subsp. mays
  peptide (1)..(46): Ceres Seq. ID no. 12378179
CMFEGSEWSSRHCRVLFCAINCDRVAILCLQGSARQEWSGGSAWSG

SEQ ID NO: 41614 - DNA, 417 bp, Zea mays subsp. mays
  misc_feature (1)..(417): Ceres Seq. ID no. 13624351
atctggactctggagtctgttgtctgcgtgtgtgcggctggttctctctgccaccgcacgagtcgcagcagagagggaaaaaccctagcagcctcccttcgtcccaactcccaaccccgcgaccccatggccgcatctaacggcggcggcggcccggcccgatctccgcagaggcggaggcggcgcttggagaggctatcaagctggtgttcgggcggtggacggcgctgcagatggcggtggagaaccagtggggcggccgcgactcccgcgccaaggccgaccagttgggcgagtccatcctattctggttctgccgcactaagggtccatattatttcgaagacttggttgatatgatgtatgacaaaatttctgaatcttttaatgcctactttgaggataatagtattgagg

SEQ ID NO: 41615 - protein, 119 aa, Zea mays subsp. mays
  peptide (1)..(119): Ceres Seq. ID no. 13624352
IWTLESVVCVCAAGSLCHRTSRSREGKTLAASLRPNSQPRDPMAASNGGGGPARSPQRRRRRLERLSSWCSGGGRRCRWRWRTSGAAATPAPRPTSWASPSYSGSAALRVHIISKTWLI

SEQ ID NO: 41616 - protein, 77 aa, Zea mays subsp. mays
  peptide (1)..(77): Ceres Seq. ID no. 13624353
MAASNGGGGPARSPQRRRRRLERLSSWCSGGGRRCRWRWRTSGAAATPAPRPTSWASPSYSGSAALRVHIISKTWLI

SEQ ID NO: 41617 - protein, 61 aa, Zea mays subsp. mays
  peptide (1)..(61): Ceres Seq. ID no. 13624354
  misc_feature (1)..(60): NCBI GI NO: 15241108 NR Description: expressed protein [Arabidopsis thaliana]
MAVENQWGGRDSRAKADQLGESILFWFCRTKGPYYFEDLVDMMYDKISESFNAYFEDNSIE

SEQ ID NO: 41618 - DNA, 675 bp, Zea mays subsp. mays; identical to SEQ ID NO: 41295
  misc_feature (1)..(675): Ceres Seq. ID no. 12375559

SEQ ID NO: 41619 - protein, 225 aa, Zea mays subsp. mays; identical to SEQ ID NO: 41296
  peptide (1)..(225): Ceres Seq. ID no. 12375560
  misc_feature (154)..(180): Pfam Name: and similar Pfam Description: Zinc finger C-x8-C-x5-C-x3-H type
  misc_feature (33)..(194): NCBI GI NO: 34912676 NR Description: P0686E09.7
  misc_feature (103)..(224): NCBI GI NO: 22331028 NR Description: hypothetical protein; protein id: At3g12680
  misc_feature (70)..(224): NCBI GI NO: 22507458 NR Description: Unknown (protein for MGC:30371) [Mus musculus]
  misc_feature (163)..(224): NCBI GI NO: 11994409 NR Description: zinc finger protein-like [Arabidopsis thaliana]
  misc_feature (176)..(224): NCBI GI NO: 12321969 NR Description: zinc finger protein, putative, 5' partial
  misc_feature (150)..(224): NCBI GI NO: 34902926 NR Description: putative zinc finger protein
  misc_feature (113)..(224): NCBI GI NO: 18390466 NR Description: zinc finger protein 2, putative
  misc_feature (151)..(224): NCBI GI NO: 34902926 NR Description: putative zinc finger protein
  misc_feature (150)..(224): NCBI GI NO: 11994409 NR Description: zinc finger protein-like [Arabidopsis thaliana]
  misc_feature (150)..(224): NCBI GI NO: 12321969 NR Description: zinc finger protein, putative, 5' partial

SEQ ID NO: 41620 - protein, 213 aa, Zea mays subsp. mays; identical to SEQ ID NO: 41297
  peptide (1)..(213): Ceres Seq. ID no. 12375561
  misc_feature (142)..(168): Pfam Name: and similar Pfam Description: Zinc finger C-x8-C-x5-C-x3-H type
  misc_feature (21)..(182): NCBI GI NO: 34912676 NR Description: P0686E09.7
  misc_feature (91)..(212): NCBI GI NO: 22331028 NR Description: hypothetical protein; protein id: At3g12680
  misc_feature (58)..(212): NCBI GI NO: 22507458 NR Description: Unknown (protein for MGC:30371) [Mus musculus]
  misc_feature (151)..(212): NCBI GI NO: 11994409 NR Description: zinc finger protein-like [Arabidopsis thaliana]
  misc_feature (164)..(212): NCBI GI NO: 12321969 NR Description: zinc finger protein, putative, 5' partial
  misc_feature (138)..(212): NCBI GI NO: 34902926 NR Description: putative zinc finger protein
  misc_feature (101)..(212): NCBI GI NO: 18390466 NR Description: zinc finger protein 2, putative
  misc_feature (139)..(212): NCBI GI NO: 34902926 NR Description: putative zinc finger protein
  misc_feature (138)..(212): NCBI GI NO: 11994409 NR Description: zinc finger protein-like [Arabidopsis thaliana]
  misc_feature (138)..(212): NCBI GI NO: 12321969 NR Description: zinc finger protein, putative, 5' partial

SEQ ID NO: 41621 - protein, 181 aa, Zea mays subsp. mays; identical to SEQ ID NO: 41298
  peptide (1)..(181): Ceres Seq. ID no. 12375562
  misc_feature (110)..(136): Pfam Name: and similar Pfam Description: Zinc finger C-x8-C-x5-C-x3-H type
  misc_feature (1)..(150): NCBI GI NO: 34912676 NR Description: P0686E09.7
  misc_feature (59)..(180): NCBI GI NO: 22331028 NR Description: hypothetical protein; protein id: At3g12680
  misc_feature (26)..(180): NCBI GI NO: 22507458 NR Description: Unknown (protein for MGC:30371) [Mus musculus]
  misc_feature (119)..(180): NCBI GI NO: 11994409 NR Description: zinc finger protein-like [Arabidopsis thaliana]
  misc_feature (132)..(180): NCBI GI NO: 12321969 NR Description: zinc finger protein, putative, 5' partial
  misc_feature (106)..(180): NCBI GI NO: 34902926 NR Description: putative zinc finger protein
  misc_feature (69)..(180): NCBI GI NO: 18390466 NR Description: zinc finger protein 2, putative
  misc_feature (107)..(180): NCBI GI NO: 34902926 NR Description: putative zinc finger protein
  misc_feature (106)..(180): NCBI GI NO: 11994409 NR Description: zinc finger protein-like [Arabidopsis thaliana]
  misc_feature (106)..(180): NCBI GI NO: 12321969 NR Description: zinc finger protein, putative, 5' partial

SEQ ID NO: 41622 - DNA, 403 bp, Zea mays subsp. mays
  misc_feature (1)..(403): Ceres Seq. ID no. 13589415
accctgacttgtgcgccatcacacacaagacacaaccccactcacccggcagggaggccctctttgtcggcggaggccatggtttccctcaagccgcagaagaggctcgccgcgggagtcctaaaatgtggcaaggggaaggtgtggcttgaccccaacgaggtctacgagatctcgatggctaactcgcgtcagaacattcgtaagctggtgaaggatggattcataattaagaagccacagaaaatccactcaaggtcccgggcaaggagggcccatgaggccaagcagaaggggaggcactctggttacggtaagcgcaggggtaccagggaggctaggctccccaccaagatcctttggatgcgcaggatgcgtgtcctcaggcgtctgctgcgcaagt

SEQ ID NO: 41623 - protein, 134 aa, Zea mays subsp. mays
  peptide (1)..(134): Ceres Seq. ID no. 13589416
  misc_feature (28)..(133): Pfam Name: Pfam Description:  Ribosomal protein L19e
  misc_feature (27)..(133): NCBI GI NO: 29837764 NR Description: putative ribosomal protein L19
  misc_feature (27)..(133): NCBI GI NO: 40287526 NR Description: 60S ribosomal protein L19 [Capsicum annuum]
  misc_feature (27)..(133): NCBI GI NO: 15228314 NR Description: 60S ribosomal protein L19 (RPL19B)
  misc_feature (27)..(133): NCBI GI NO: 15218602 NR Description: 60S ribosomal protein L19 (RPL19A)
  misc_feature (27)..(133): NCBI GI NO: 18087585 NR Description: At1g02780/T14P4_3 [Arabidopsis thaliana]
  misc_feature (27)..(133): NCBI GI NO: 7440943 NR Description: ribosomal protein L19
  misc_feature (27)..(133): NCBI GI NO: 15235290 NR Description: 60S ribosomal protein L19 (RPL19C)
  misc_feature (27)..(133): NCBI GI NO: 28200276 NR Description: ribosomal protein L19
  misc_feature (27)..(133): NCBI GI NO: 28630352 NR Description: ribosomal protein L19 [Branchiostoma lanceolatum]
  misc_feature (27)..(133): NCBI GI NO: 19075307 NR Description: 60S ribosomal protein L19B
TLTCAPSHTRHNPTHPAGRPSLSAEAMVSLKPQKRLAAGVLKCGKGKVWLDPNEVYEISMANSRQNIRKLVKDGFIIKKPQKIHSRSRARRAHEAKQKGRHSGYGKRRGTREARLPTKILWMRRMRVLRRLLRK

SEQ ID NO: 41624 - protein, 108 aa, Zea mays subsp. mays
  peptide (1)..(108): Ceres Seq. ID no. 13589417
  misc_feature (2)..(107): Pfam Name: Pfam Description:  Ribosomal protein L19e
  misc_feature (1)..(107): NCBI GI NO: 29837764 NR Description: putative ribosomal protein L19
  misc_feature (1)..(107): NCBI GI NO: 40287526 NR Description: 60S ribosomal protein L19 [Capsicum annuum]
  misc_feature (1)..(107): NCBI GI NO: 15228314 NR Description: 60S ribosomal protein L19 (RPL19B)
  misc_feature (1)..(107): NCBI GI NO: 15218602 NR Description: 60S ribosomal protein L19 (RPL19A)
  misc_feature (1)..(107): NCBI GI NO: 18087585 NR Description: At1g02780/T14P4_3 [Arabidopsis thaliana]
  misc_feature (1)..(107): NCBI GI NO: 7440943 NR Description: ribosomal protein L19
  misc_feature (1)..(107): NCBI GI NO: 15235290 NR Description: 60S ribosomal protein L19 (RPL19C)
  misc_feature (1)..(107): NCBI GI NO: 28200276 NR Description: ribosomal protein L19
  misc_feature (1)..(107): NCBI GI NO: 28630352 NR Description: ribosomal protein L19 [Branchiostoma lanceolatum]
  misc_feature (1)..(107): NCBI GI NO: 19075307 NR Description: 60S ribosomal protein L19B
MVSLKPQKRLAAGVLKCGKGKVWLDPNEVYEISMANSRQNIRKLVKDGFIIKKPQKIHSRSRARRAHEAKQKGRHSGYGKRRGTREARLPTKILWMRRMRVLRRLLRK

SEQ ID NO: 41625 - protein, 75 aa, Zea mays subsp. mays
  peptide (1)..(75): Ceres Seq. ID no. 13589418
  misc_feature (1)..(74): Pfam Name: Pfam Description:  Ribosomal protein L19e
  misc_feature (1)..(74): NCBI GI NO: 29837764 NR Description: putative ribosomal protein L19
  misc_feature (1)..(74): NCBI GI NO: 40287526 NR Description: 60S ribosomal protein L19 [Capsicum annuum]
  misc_feature (1)..(74): NCBI GI NO: 15228314 NR Description: 60S ribosomal protein L19 (RPL19B)
  misc_feature (1)..(74): NCBI GI NO: 15218602 NR Description: 60S ribosomal protein L19 (RPL19A)
  misc_feature (1)..(74): NCBI GI NO: 18087585 NR Description: At1g02780/T14P4_3 [Arabidopsis thaliana]
  misc_feature (1)..(74): NCBI GI NO: 7440943 NR Description: ribosomal protein L19
  misc_feature (1)..(74): NCBI GI NO: 15235290 NR Description: 60S ribosomal protein L19 (RPL19C)
  misc_feature (1)..(74): NCBI GI NO: 28200276 NR Description: ribosomal protein L19
  misc_feature (1)..(74): NCBI GI NO: 28630352 NR Description: ribosomal protein L19 [Branchiostoma lanceolatum]
  misc_feature (1)..(74): NCBI GI NO: 19075307 NR Description: 60S ribosomal protein L19B
MANSRQNIRKLVKDGFIIKKPQKIHSRSRARRAHEAKQKGRHSGYGKRRGTREARLPTKILWMRRMRVLRRLLRK

SEQ ID NO: 41626 - DNA, 1463 bp, Zea mays subsp. mays
  misc_feature (1)..(1463): Ceres Seq. ID no. 12383473
gcacgagaccattacctagaacatcctaatcgaaaacccgatcagtcgccgcccaagcctagcagatccgccggcgagcgcgcgggggcaatgggtgtcgtctcggcagcggcggacgcgattgtcgcggttttctccctcaccatcgtcgtcgcggcgccgctactcgacgcgcagtccgtcctcccgcataccctctacccggcgccgctcctggaactcaagcgctggtacgccgccgagtttggcgactacctcgtggcccagtcccccggcttcttccgtggccttgtttgcctcgagctcgccttccaatggccgctcgccgtcgccacactctacggcatcctcacccgccgccgctgggctgccaccacctccctcatggccggcgttggcaccctcacctccatggtaaagccgtgtttcccttctcccttgtagtggagtcacgattgtaatgcattatgcatgcatgtctggaatttcgtgagaccagtgtctcaccgctgcagctctgcccctgtgccccagatccaaaacactaccatggtggatgcacaattgtacacttaaaagtcagttcagttgatgtggaatccaaacatagtttctcatgtgcttattttgttatgattggctgattgttcaaatgaaatcgtgctggaaaaggttttgtagacccatgggattcagagttacttccatattgtcttggcataccaattgcatttcctgttggtgatgattcccagaatgtcaagctattgccaacatttttagttttgttctctgaaccatggttccttttgacctcaaatgtgctatggataggtgacgttgttcaggttaaatctcaaccgcactgtctcgtattaaatgataggagggaaaaaaatttcttgtcacaatatcagatatcaaatcatcgcaaaaattgagtactgactacctgttatgctagattctgcaattcttggtgagatgttaggttcaggcaaatcaacaccaaagttgcttcagatgtatgttccttatgctgtttttgctgtcattgctattctacgtggactttgctcatgctctggacgcactactgctggttcatcacttgggccttctgcccggaagaagagggtctagatcagcagtgacacttggagaattttcggtttgagacagtggcgccagagcactaatgctggtcagaagacgattatctggatcaggtttctatccctggtatttagcacggatgttgaaaaatccagatagtgttagtggctgtttctctaggatttggtgttcgttttccctgaaatgtgatattcatcttgcctttatttccattttaccctttgattatatgtcttgctaactaagacattgttttgtttactggatgagctgattcaactctggcattgttctggcgaataagtttcataaatccttgtcttggt

SEQ ID NO: 41627 - protein, 147 aa, Zea mays subsp. mays
  peptide (1)..(147): Ceres Seq. ID no. 12383474
  misc_feature (31)..(138): NCBI GI NO: 28411944 NR Description: OSJNBa0027N13.37
  misc_feature (31)..(138): NCBI GI NO: 28411943 NR Description: OSJNBa0027N13.35
  misc_feature (31)..(138): NCBI GI NO: 18402955 NR Description: expressed protein; protein id: At2g32380
  misc_feature (31)..(138): NCBI GI NO: 18390494 NR Description: expressed protein; protein id: At1g05210
  misc_feature (31)..(138): NCBI GI NO: 15220447 NR Description: hypothetical protein; protein id: At1g05220.1
  misc_feature (41)..(139): NCBI GI NO: 2135212 NR Description: gene MAC30 protein - human (fragment)
  misc_feature (31)..(139): NCBI GI NO: 27688749 NR Description: similar to RIKEN cDNA 1810014L12
  misc_feature (31)..(139): NCBI GI NO: 19526880 NR Description: RIKEN cDNA 1810014L12 [Mus musculus]
ARDHYLEHPNRKPDQSPPKPSRSAGERAGAMGVVSAAADAIVAVFSLTIVVAAPLLDAQSVLPHTLYPAPLLELKRWYAAEFGDYLVAQSPGFFRGLVCLELAFQWPLAVATLYGILTRRRWAATTSLMAGVGTLTSMVKPCFPSPL

SEQ ID NO: 41628 - protein, 117 aa, Zea mays subsp. mays
  peptide (1)..(117): Ceres Seq. ID no. 12383475
  misc_feature (1)..(108): NCBI GI NO: 28411944 NR Description: OSJNBa0027N13.37
  misc_feature (1)..(108): NCBI GI NO: 28411943 NR Description: OSJNBa0027N13.35
  misc_feature (1)..(108): NCBI GI NO: 18402955 NR Description: expressed protein; protein id: At2g32380
  misc_feature (1)..(108): NCBI GI NO: 18390494 NR Description: expressed protein; protein id: At1g05210
  misc_feature (1)..(108): NCBI GI NO: 15220447 NR Description: hypothetical protein; protein id: At1g05220.1
  misc_feature (11)..(109): NCBI GI NO: 2135212 NR Description: gene MAC30 protein - human (fragment)
  misc_feature (1)..(109): NCBI GI NO: 27688749 NR Description: similar to RIKEN cDNA 1810014L12
  misc_feature (1)..(109): NCBI GI NO: 19526880 NR Description: RIKEN cDNA 1810014L12 [Mus musculus]
MGVVSAAADAIVAVFSLTIVVAAPLLDAQSVLPHTLYPAPLLELKRWYAAEFGDYLVAQSPGFFRGLVCLELAFQWPLAVATLYGILTRRRWAATTSLMAGVGTLTSMVKPCFPSPL

SEQ ID NO: 41629 - DNA, 1633 bp, Zea mays subsp. mays
  misc_feature (1)..(1633): Ceres Seq. ID no. 13495210
gcacgagaccattacctagaacatcctaatcgaaaaagctgccagcctagctgccaacgattgtcgtaagtcttggagaaactgcgcatcagtttgacctagctgccagcctgatactactcacgaactggcatggcatggtaggtgggttcgggctttcaagcatggcttccacacttttcctctagctactagctcctcccgcgcgcgacggccatggccagcgagctgctgtcgccgctcatcccgcaccagcagcgtcgacgcgctctcgccgtcgacgtggccgcgcccctgctcgcgctcctcctggccgctgtcgccttctcccgctcaccggtggcggcactggtcagctcttcgaggctcgttgacctgacactcctcgccggcgctcaggggaagggagcggtgtgcttggatgggaccccgcctggttaccaccttcggagaggattcggttccggagctcacaactggctcgtcttccttgagggaggaggttggtgcaacaccacgcagagctgctccgagcgcaaaatgaccaacttcggttcatctaagtatatgggagcagtaaacttcactgggatactcagcaatgatcacacagaaaatcctgatttctacaactggaatacagttgtcataaggtactgcgacggagcatcatttgctggggatgcagagggagaagatctggatggaaccaaacttttcttcagaggattgcgtatctgggaagcagttgtagatgaactcatgggaaaaggaatggacgctgctaaacaagccttgcttacaggctgttctgctggttctctagctgcgctactgcactgtgataatttccatggacggtttcctcatgaagtttcagttaaatgcctttctgatgctggattttttattgacgagaaggatttatctggagaaagatccatgcggtcgctcatcagtggagtagttcaccttcagaatgttaaagaagttttacccaatgactgcctccaaaagaaggatccaacagaggcagtgtttctttcctgctgaactgattaagggcatcaccacccccacgtttattctgaactccgattacgattcttggcagatacgaaacattctcgcaccaaatggatcctatcctggccaggaatggtctagttgcaaagcagatatccggaactgcagttgcgcacaaattgatgtactgcatggattcaagaagaaattagtcagtgaattgaaggttgccgaagataacaaggactggggcctgttcattgattcatgctttacccactgtcaaacaccattcgatatcacatggaattcaccgatctcaccaaggctcggcaacaagtctatctcagaggccgttggggattggtatttcgatagaaggcaaaacgcgaaacagattgactgcgagtacccatgcaaccccacatgcagcagtcttctgcctactgcttgattcgcaaagggctgcactgagatcaccaggcttttctcattttcaaattagttttgctgaggattcaaaaagggagctttgccttattggtaaaacctgcaattgactaaacacgacttgcagtagttgtgcttccatcaaaagcaatatgtc

SEQ ID NO: 41630 - protein, 278 aa, Zea mays subsp. mays
  peptide (1)..(278): Ceres Seq. ID no. 13495211
  misc_feature (27)..(254): Pfam Name: Pfam Description:  Pectinacetylesterase
  misc_feature (1)..(254): NCBI GI NO: 34907550 NR Description: putative pectinacetylesterase
  misc_feature (45)..(275): NCBI GI NO: 6478931 NR Description: putative pectinacetylesterase
  misc_feature (51)..(275): NCBI GI NO: 25347293 NR Description: probable pectinacetylesterase precursor T8L23.6
  misc_feature (51)..(275): NCBI GI NO: 30696158 NR Description: pectinacetylesterase, putative
  misc_feature (45)..(275): NCBI GI NO: 28392968 NR Description: putative pectinacetylesterase
  misc_feature (51)..(275): NCBI GI NO: 21703105 NR Description: At1g57590/T8L23_6 [Arabidopsis thaliana]
  misc_feature (51)..(275): NCBI GI NO: 15226462 NR Description: pectinacetylesterase, putative
  misc_feature (45)..(275): NCBI GI NO: 22330933 NR Description: pectinacetylesterase family [Arabidopsis thaliana]
  misc_feature (51)..(275): NCBI GI NO: 18397406 NR Description: pectinacetylesterase, putative
  misc_feature (27)..(264): NCBI GI NO: 10176854 NR Description: pectinacetylesterase [Arabidopsis thaliana]
MASELLSPLIPHQQRRRALAVDVAAPLLALLLAAVAFSRSPVAALVSSSRLVDLTLLAGAQGKGAVCLDGTPPGYHLRRGFGSGAHNWLVFLEGGGWCNTTQSCSERKMTNFGSSKYMGAVNFTGILSNDHTENPDFYNWNTVVIRYCDGASFAGDAEGEDLDGTKLFFRGLRIWEAVVDELMGKGMDAAKQALLTGCSAGSLAALLHCDNFHGRFPHEVSVKCLSDAGFFIDEKDLSGERSMRSLISGVVHLQNVKEVLPNDCLQKKDPTEAVFLSC

SEQ ID NO: 41631 - protein, 170 aa, Zea mays subsp. mays
  peptide (1)..(170): Ceres Seq. ID no. 13495212
  misc_feature (1)..(146): Pfam Name: Pfam Description:  Pectinacetylesterase
  misc_feature (1)..(146): NCBI GI NO: 34907550 NR Description: putative pectinacetylesterase
  misc_feature (1)..(167): NCBI GI NO: 6478931 NR Description: putative pectinacetylesterase
  misc_feature (1)..(167): NCBI GI NO: 25347293 NR Description: probable pectinacetylesterase precursor T8L23.6
  misc_feature (1)..(167): NCBI GI NO: 30696158 NR Description: pectinacetylesterase, putative
  misc_feature (1)..(167): NCBI GI NO: 28392968 NR Description: putative pectinacetylesterase
  misc_feature (1)..(167): NCBI GI NO: 21703105 NR Description: At1g57590/T8L23_6 [Arabidopsis thaliana]
  misc_feature (1)..(167): NCBI GI NO: 15226462 NR Description: pectinacetylesterase, putative
  misc_feature (1)..(167): NCBI GI NO: 22330933 NR Description: pectinacetylesterase family [Arabidopsis thaliana]
  misc_feature (1)..(167): NCBI GI NO: 18397406 NR Description: pectinacetylesterase, putative
  misc_feature (1)..(156): NCBI GI NO: 10176854 NR Description: pectinacetylesterase [Arabidopsis thaliana]
MTNFGSSKYMGAVNFTGILSNDHTENPDFYNWNTVVIRYCDGASFAGDAEGEDLDGTKLFFRGLRIWEAVVDELMGKGMDAAKQALLTGCSAGSLAALLHCDNFHGRFPHEVSVKCLSDAGFFIDEKDLSGERSMRSLISGVVHLQNVKEVLPNDCLQKKDPTEAVFLSC

SEQ ID NO: 41632 - protein, 166 aa, Zea mays subsp. mays
  peptide (1)..(166): Ceres Seq. ID no. 13495213
  misc_feature (19)..(149): Pfam Name: Pfam Description:  Pectinacetylesterase
  misc_feature (19)..(165): NCBI GI NO: 34907550 NR Description: putative pectinacetylesterase
  misc_feature (14)..(162): NCBI GI NO: 6478931 NR Description: putative pectinacetylesterase
  misc_feature (14)..(163): NCBI GI NO: 25347293 NR Description: probable pectinacetylesterase precursor T8L23.6
  misc_feature (14)..(163): NCBI GI NO: 30696158 NR Description: pectinacetylesterase, putative
  misc_feature (1)..(163): NCBI GI NO: 28392968 NR Description: putative pectinacetylesterase
  misc_feature (14)..(163): NCBI GI NO: 21703105 NR Description: At1g57590/T8L23_6 [Arabidopsis thaliana]
  misc_feature (9)..(163): NCBI GI NO: 15226462 NR Description: pectinacetylesterase, putative
  misc_feature (14)..(159): NCBI GI NO: 22330933 NR Description: pectinacetylesterase family [Arabidopsis thaliana]
  misc_feature (20)..(163): NCBI GI NO: 18397406 NR Description: pectinacetylesterase, putative
  misc_feature (20)..(166): NCBI GI NO: 10176854 NR Description: pectinacetylesterase [Arabidopsis thaliana]
MLKKFYPMTASKRRIQQRQCFFPAELIKGITTPTFILNSDYDSWQIRNILAPNGSYPGQEWSSCKADIRNCSCAQIDVLHGFKKKLVSELKVAEDNKDWGLFIDSCFTHCQTPFDITWNSPISPRLGNKSISEAVGDWYFDRRQNAKQIDCEYPCNPTCSSLLPTA

SEQ ID NO: 41633 - DNA, 1885 bp, Zea mays subsp. mays
  misc_feature (1)..(1885): Ceres Seq. ID no. 13577867
  misc_feature (469)..(469): n is a, c, t, g, unknown, or other
  misc_feature (454)..(454): n is a, c, t, g, unknown, or other
aacacatgtgtgtgcagtgtagacgagcgcgtacgtaacttattgggaggttgcgcgtacggcaactcccgtcgcctccgcgctcccctaaccgcctcccccttgtctcatggtggaagtggaacaaccctccgcctgcgccgctgcgaagtaagtgagaagggaaaacaagaaacgaggagggagggaggggacgacgtacggagcgagctagcggcgcggcgggcgtcgctcggcatggacgcggaggcggcggcggcggcggcggcgacggcggtggaggagagggagcggctgcggaggagcttcgcgtcggggaggacgcggccggcggcgtggcgggaggcgcagctgcgcggccttctgcgcatggccgccgagagggaggacgacatctgcgccgccctgcacgccgacctcgcgaagccccttaccgagtgttatgtacacgagntatcattggtcattncttcgtgcaaatttgctctcaagaatctcaagaaatggatgaagccccgaaaggtccccggcgggctgctgaccttcccgtcggcggccagcgtcgcggcggagcctctcggcgtcgtgctcgtcatctccgcctggaactaccccttcttgctggccatcgacccggtcgtgggggcattcgcggcgggcaacgccgtggcgctgaagccgtcggaggtggcgccggccacgtcgttgctgctggccgacctgctgccgcgctacgtggacccctcgtgcgtcagggtcgtgcagggcggcatcccggagaccaccgcgctgctggagctccagtgggacaagatcttctacacaggtaacagcagagtaggacgcatcgtcatgtcctacgctgccaatcacctgacgcccgtggtcttggagctcggtggcaaatgccctgtcgtcgtcgactccgacgtcaacctccacgtcgctgccaagaggatcgccgccggcaagtggggctgcaacagcggccaagcctgcgtctcgccggactacgtcgtcaccaccaaatcgttcgcgccaaagctgctggagtccctgaagcgagtgctattcgagttctacggggaggagccgctgcggtcgccggacctgtcgcgcgtcgtcaactccaaccacttcaacaggctcatggcgctcatggacgactactcggtctccggcaatgtcgcgttcggcggccagatcgacgagcggcggctaaggatcgccccgacgctgctgctggacgtcccgctcgactccgcgatgatgaaggaggagatcttcgggccgctgcttcccataatcacggtggacaagatcggcgagagcttcgctgtgatcaactccatgcccaagccgctggcagcttacctcttcagcaacgacgggcaggctcaagcagcagttcgagaggaccgtctcggcgggagggatcatgttcaacgacaccggcatccacctgacaaacccgaacctgccgttcggaggagtcggggagagcggcatgggcgcctaccacggcgccttcagcttcgacgccttctcccacaggaaggccgtcctggaccgcagcttcctcggcgaggccagggccaggtacccgccgtacacgccggcgaagctcgccatcctcaggggcgtgctcaatggcagcccgcttgccacggttcaggcggctgcggggtgtacaggaggggcatcagctgactgactgactgaccccccttcatgcttattattaataataagcataaatattcaccgcatacacattgctgtgcttttattaaggttgttgtgagggcgaaaaatgtattgaccctttgcgtgtgcgcgtgcgtgtatagcaactattaataaaagaaaaaagtgatgttcattc

SEQ ID NO: 41634 - protein, 569 aa, Zea mays subsp. mays
  peptide (1)..(569): Ceres Seq. ID no. 13577868
  misc_feature (86)..(463): Pfam Name: Pfam Description:  Aldehyde dehydrogenase family
  misc_feature (86)..(463): NCBI GI NO: 15219358 NR Description: aldehyde dehydrogenase, putative (ALDH)
  misc_feature (86)..(463): NCBI GI NO: 21536879 NR Description: aldehyde dehydrogenase, putative
  misc_feature (99)..(505): NCBI GI NO: 17065918 NR Description: aldehyde dehydrogenase
  misc_feature (89)..(505): NCBI GI NO: 18418408 NR Description: aldehyde dehydrogenase, putative (ALDH)
  misc_feature (89)..(505): NCBI GI NO: 17065876 NR Description: aldehyde dehydrogenase [Arabidopsis thaliana]
  misc_feature (99)..(477): NCBI GI NO: 33317836 NR Description: aldehyde dehydrogenase
  misc_feature (95)..(477): NCBI GI NO: 26341802 NR Description: unnamed protein product [Mus musculus]
  misc_feature (95)..(477): NCBI GI NO: 12698456 NR Description: fatty aldehyde dehydrogenase [Mus musculus]
  misc_feature (95)..(477): NCBI GI NO: 12698457 NR Description: fatty aldehyde dehydrogenase variant form
  misc_feature (99)..(476): NCBI GI NO: 4973431 NR Description: putative aldehyde dehydrogenase OS-ALDH
  misc_feature (152)..(152): Xaa is any aa, unknown or other
  misc_feature (157)..(157): Xaa is any aa, unknown or other
NTCVCSVDERVRNLLGGCAYGNSRRLRAPLTASPLSHGGSGTTLRLRRCEVSEKGKQETRREGGDDVRSELAARRASLGMDAEAAAAAAATAVEERERLRRSFASGRTRPAAWREAQLRGLLRMAAEREDDICAALHADLAKPLTECYVHEXSLVIXSCKFALKNLKKWMKPRKVPGGLLTFPSAASVAAEPLGVVLVISAWNYPFLLAIDPVVGAFAAGNAVALKPSEVAPATSLLLADLLPRYVDPSCVRVVQGGIPETTALLELQWDKIFYTGNSRVGRIVMSYAANHLTPVVLELGGKCPVVVDSDVNLHVAAKRIAAGKWGCNSGQACVSPDYVVTTKSFAPKLLESLKRVLFEFYGEEPLRSPDLSRVVNSNHFNRLMALMDDYSVSGNVAFGGQIDERRLRIAPTLLLDVPLDSAMMKEEIFGPLLPIITVDKIGESFAVINSMPKPLAAYLFSNDGQAQAAVREDRLGGRDHVQRHRHPPDKPEPAVRRSRGERHGRLPRRLQLRRLLPQEGRPGPQLPRRGQGQVPAVHAGEARHPQGRAQWQPACHGSGGCGVYRRGIS

SEQ ID NO: 41635 - protein, 490 aa, Zea mays subsp. mays
  peptide (1)..(490): Ceres Seq. ID no. 13577869
  misc_feature (7)..(384): Pfam Name: Pfam Description:  Aldehyde dehydrogenase family
  misc_feature (7)..(384): NCBI GI NO: 15219358 NR Description: aldehyde dehydrogenase, putative (ALDH)
  misc_feature (7)..(384): NCBI GI NO: 21536879 NR Description: aldehyde dehydrogenase, putative
  misc_feature (20)..(426): NCBI GI NO: 17065918 NR Description: aldehyde dehydrogenase
  misc_feature (10)..(426): NCBI GI NO: 18418408 NR Description: aldehyde dehydrogenase, putative (ALDH)
  misc_feature (10)..(426): NCBI GI NO: 17065876 NR Description: aldehyde dehydrogenase [Arabidopsis thaliana]
  misc_feature (20)..(398): NCBI GI NO: 33317836 NR Description: aldehyde dehydrogenase
  misc_feature (16)..(398): NCBI GI NO: 26341802 NR Description: unnamed protein product [Mus musculus]
  misc_feature (16)..(398): NCBI GI NO: 12698456 NR Description: fatty aldehyde dehydrogenase [Mus musculus]
  misc_feature (16)..(398): NCBI GI NO: 12698457 NR Description: fatty aldehyde dehydrogenase variant form
  misc_feature (20)..(397): NCBI GI NO: 4973431 NR Description: putative aldehyde dehydrogenase OS-ALDH
  misc_feature (73)..(73): Xaa is any aa, unknown or other
  misc_feature (78)..(78): Xaa is any aa, unknown or other
MDAEAAAAAAATAVEERERLRRSFASGRTRPAAWREAQLRGLLRMAAEREDDICAALHADLAKPLTECYVHEXSLVIXSCKFALKNLKKWMKPRKVPGGLLTFPSAASVAAEPLGVVLVISAWNYPFLLAIDPVVGAFAAGNAVALKPSEVAPATSLLLADLLPRYVDPSCVRVVQGGIPETTALLELQWDKIFYTGNSRVGRIVMSYAANHLTPVVLELGGKCPVVVDSDVNLHVAAKRIAAGKWGCNSGQACVSPDYVVTTKSFAPKLLESLKRVLFEFYGEEPLRSPDLSRVVNSNHFNRLMALMDDYSVSGNVAFGGQIDERRLRIAPTLLLDVPLDSAMMKEEIFGPLLPIITVDKIGESFAVINSMPKPLAAYLFSNDGQAQAAVREDRLGGRDHVQRHRHPPDKPEPAVRRSRGERHGRLPRRLQLRRLLPQEGRPGPQLPRRGQGQVPAVHAGEARHPQGRAQWQPACHGSGGCGVYRRGIS

SEQ ID NO: 41636 - protein, 446 aa, Zea mays subsp. mays
  peptide (1)..(446): Ceres Seq. ID no. 13577870
  misc_feature (1)..(340): Pfam Name: Pfam Description:  Aldehyde dehydrogenase family
  misc_feature (1)..(340): NCBI GI NO: 15219358 NR Description: aldehyde dehydrogenase, putative (ALDH)
  misc_feature (1)..(340): NCBI GI NO: 21536879 NR Description: aldehyde dehydrogenase, putative
  misc_feature (1)..(382): NCBI GI NO: 17065918 NR Description: aldehyde dehydrogenase
  misc_feature (1)..(382): NCBI GI NO: 18418408 NR Description: aldehyde dehydrogenase, putative (ALDH)
  misc_feature (1)..(382): NCBI GI NO: 17065876 NR Description: aldehyde dehydrogenase [Arabidopsis thaliana]
  misc_feature (1)..(354): NCBI GI NO: 33317836 NR Description: aldehyde dehydrogenase
  misc_feature (1)..(354): NCBI GI NO: 26341802 NR Description: unnamed protein product [Mus musculus]
  misc_feature (1)..(354): NCBI GI NO: 12698456 NR Description: fatty aldehyde dehydrogenase [Mus musculus]
  misc_feature (1)..(354): NCBI GI NO: 12698457 NR Description: fatty aldehyde dehydrogenase variant form
  misc_feature (1)..(353): NCBI GI NO: 4973431 NR Description: putative aldehyde dehydrogenase OS-ALDH
  misc_feature (29)..(29): Xaa is any aa, unknown or other
  misc_feature (34)..(34): Xaa is any aa, unknown or other
MAAEREDDICAALHADLAKPLTECYVHEXSLVIXSCKFALKNLKKWMKPRKVPGGLLTFPSAASVAAEPLGVVLVISAWNYPFLLAIDPVVGAFAAGNAVALKPSEVAPATSLLLADLLPRYVDPSCVRVVQGGIPETTALLELQWDKIFYTGNSRVGRIVMSYAANHLTPVVLELGGKCPVVVDSDVNLHVAAKRIAAGKWGCNSGQACVSPDYVVTTKSFAPKLLESLKRVLFEFYGEEPLRSPDLSRVVNSNHFNRLMALMDDYSVSGNVAFGGQIDERRLRIAPTLLLDVPLDSAMMKEEIFGPLLPIITVDKIGESFAVINSMPKPLAAYLFSNDGQAQAAVREDRLGGRDHVQRHRHPPDKPEPAVRRSRGERHGRLPRRLQLRRLLPQEGRPGPQLPRRGQGQVPAVHAGEARHPQGRAQWQPACHGSGGCGVYRRGIS

SEQ ID NO: 41637 - DNA, 1719 bp, Zea mays subsp. mays; identical to SEQ ID NO: 24965
  misc_feature (1)..(1719): Ceres Seq. ID no. 12348980

SEQ ID NO: 41638 - protein, 369 aa, Zea mays subsp. mays; identical to SEQ ID NO: 24966
  peptide (1)..(369): Ceres Seq. ID no. 12348981
  misc_feature (32)..(319): Pfam Name: Pfam Description:  Protein kinase domain
  misc_feature (1)..(369): NCBI GI NO: 11869994 NR Description: MAP kinase 2 [Oryza sativa]
  misc_feature (1)..(369): NCBI GI NO: 24412848 NR Description: putative mitogen-activated protein kinase, msrmk3
  misc_feature (1)..(369): NCBI GI NO: 6491800 NR Description: MAPK4 protein [Oryza sativa]
  misc_feature (1)..(368): NCBI GI NO: 7341300 NR Description: MAP kinase MAPK2 [Oryza sativa]
  misc_feature (1)..(365): NCBI GI NO: 2499614 NR Description: MITOGEN-ACTIVATED PROTEIN KINASE HOMOLOG NTF3
  misc_feature (1)..(365): NCBI GI NO: 18406388 NR Description: expressed protein; protein id: At1g59580
  misc_feature (1)..(365): NCBI GI NO: 533281 NR Description: ATMPK2 [Arabidopsis thaliana]
  misc_feature (1)..(362): NCBI GI NO: 2499612 NR Description: MITOGEN-ACTIVATED PROTEIN KINASE HOMOLOG 1 (PMEK1)
  misc_feature (1)..(365): NCBI GI NO: 15218451 NR Description: putative mitogen-activated protein kinase
  misc_feature (1)..(362): NCBI GI NO: 4887127 NR Description: putative mitogen-activated protein kinase MAPK

SEQ ID NO: 41639 - protein, 367 aa, Zea mays subsp. mays; identical to SEQ ID NO: 24967
  peptide (1)..(367): Ceres Seq. ID no. 12348982
  misc_feature (30)..(317): Pfam Name: Pfam Description:  Protein kinase domain
  misc_feature (1)..(367): NCBI GI NO: 11869994 NR Description: MAP kinase 2 [Oryza sativa]
  misc_feature (1)..(367): NCBI GI NO: 24412848 NR Description: putative mitogen-activated protein kinase, msrmk3
  misc_feature (1)..(367): NCBI GI NO: 6491800 NR Description: MAPK4 protein [Oryza sativa]
  misc_feature (1)..(366): NCBI GI NO: 7341300 NR Description: MAP kinase MAPK2 [Oryza sativa]
  misc_feature (1)..(363): NCBI GI NO: 2499614 NR Description: MITOGEN-ACTIVATED PROTEIN KINASE HOMOLOG NTF3
  misc_feature (1)..(363): NCBI GI NO: 18406388 NR Description: expressed protein; protein id: At1g59580
  misc_feature (1)..(363): NCBI GI NO: 533281 NR Description: ATMPK2 [Arabidopsis thaliana]
  misc_feature (1)..(360): NCBI GI NO: 2499612 NR Description: MITOGEN-ACTIVATED PROTEIN KINASE HOMOLOG 1 (PMEK1)
  misc_feature (1)..(363): NCBI GI NO: 15218451 NR Description: putative mitogen-activated protein kinase
  misc_feature (1)..(360): NCBI GI NO: 4887127 NR Description: putative mitogen-activated protein kinase MAPK

SEQ ID NO: 41640 - protein, 366 aa, Zea mays subsp. mays; identical to SEQ ID NO: 24968
  peptide (1)..(366): Ceres Seq. ID no. 12348983
  misc_feature (29)..(316): Pfam Name: Pfam Description:  Protein kinase domain
  misc_feature (1)..(366): NCBI GI NO: 11869994 NR Description: MAP kinase 2 [Oryza sativa]
  misc_feature (1)..(366): NCBI GI NO: 24412848 NR Description: putative mitogen-activated protein kinase, msrmk3
  misc_feature (1)..(366): NCBI GI NO: 6491800 NR Description: MAPK4 protein [Oryza sativa]
  misc_feature (1)..(365): NCBI GI NO: 7341300 NR Description: MAP kinase MAPK2 [Oryza sativa]
  misc_feature (1)..(362): NCBI GI NO: 2499614 NR Description: MITOGEN-ACTIVATED PROTEIN KINASE HOMOLOG NTF3
  misc_feature (1)..(362): NCBI GI NO: 18406388 NR Description: expressed protein; protein id: At1g59580
  misc_feature (1)..(362): NCBI GI NO: 533281 NR Description: ATMPK2 [Arabidopsis thaliana]
  misc_feature (1)..(359): NCBI GI NO: 2499612 NR Description: MITOGEN-ACTIVATED PROTEIN KINASE HOMOLOG 1 (PMEK1)
  misc_feature (1)..(362): NCBI GI NO: 15218451 NR Description: putative mitogen-activated protein kinase
  misc_feature (1)..(359): NCBI GI NO: 4887127 NR Description: putative mitogen-activated protein kinase MAPK

SEQ ID NO: 41641 - DNA, 1275 bp, Zea mays subsp. mays
  misc_feature (1)..(1275): Ceres Seq. ID no. 12390143
aacaggcaagtcttcgcttcgctcctctctgcggctccctccggcgagcggcgatggccttctcacccccactgatcgactgggaggcggagagctaccctgcctacccagatttcgcggccattccccttttcgtcgtcttcttcctcgtcgtccgtttcttcctcgaccgcttcgtattcgagtggttagccaggaagctgattttcaaggaggaggatgagaagaagcttggccctactacatatgcaggcaagagaaagatcaggaaatttaaagaatcagcttggaaatgcatgtattttctttctggggagctattggcattgtctgtgacgtacaacgagccatggttcacaaccacaagaaatttctgggttggaccaggcgatcagatctggccagatcaaaaaattaaattgaaactcaagacagtctatatgtatgttgctggcttttacacatactcgatatttgcccttttgttttgggaaataaggcgttcagacttcggtatttcaatgactcatcatgtagcaaccgtctgtctgatagcactgtcttacatattcagatttgctcgggtgggttcagttgtccttgccattcatgatgctactgatgtgttcctggagcttggaaaaatttccaagtatagtggccatgagttgtttgcagatgtttcatttcttgttttcgtcagttcttgggtactcctccgccttatatattatccgttctggattctctggagcacgagctatgaagttgttctgactctagacaaggaaaagcataaagttgacgggccaatatactactatgtattcaacagtcttctcttctctctacttgttctacacatatattggtgggttttaatgtatcggatgcttgtgaagcaaatacagtctagagggcacgttggcgatgatatacgatctgattctgaaggtgaagaggaacatgaggattgattgagctgtgtagagtcggaagataataaataacatggggatggattgagctgtataagttccaaaggcgaaaaggaatacatggatggattgagctgtgtaaattctgaaggtgtatcaaatcattctgctgtttttcttctgtccttgttcttgataagtaacaataaattagtgcccttctctaggtgagcatcatcgatagatgtcacttgggcattatcattatctattgatgtaaaatcaggtcacattgcatagcacacacacaacagttaatggaaaatgttagcagtgc

SEQ ID NO: 41642 - protein, 324 aa, Zea mays subsp. mays
  peptide (1)..(324): Ceres Seq. ID no. 12390144
  misc_feature (109)..(321): Pfam Name: LAG1 Pfam Description: Longevity-assurance protein
  misc_feature (25)..(324): NCBI GI NO: 25518747 NR Description: hypothetical protein F13B4
  misc_feature (25)..(324): NCBI GI NO: 16974114 NR Description: putative resistance protein
  misc_feature (25)..(324): NCBI GI NO: 18404559 NR Description: expressed protein; protein id: At3g25540
  misc_feature (25)..(324): NCBI GI NO: 7688742 NR Description: ASC1 [Lycopersicon esculentum]
  misc_feature (25)..(254): NCBI GI NO: 30683361 NR Description: longevity assurance protein -related
  misc_feature (41)..(321): NCBI GI NO: 15230323 NR Description: longevity factor-like protein
  misc_feature (41)..(321): NCBI GI NO: 7658241 NR Description: LAG1 homolog 2 [Arabidopsis thaliana]
  misc_feature (42)..(320): NCBI GI NO: 34901974 NR Description: unknown protein
  misc_feature (25)..(139): NCBI GI NO: 8920562 NR Description: Contains similarity to LAG1 homolog 1 fromArabidopsis thaliana gb|AF198179
  misc_feature (90)..(317): NCBI GI NO: 21358551 NR Description: Longevity assurance gene 1 CG3576-PB
QASLRFAPLCGSLRRAAMAFSPPLIDWEAESYPAYPDFAAIPLFVVFFLVVRFFLDRFVFEWLARKLIFKEEDEKKLGPTTYAGKRKIRKFKESAWKCMYFLSGELLALSVTYNEPWFTTTRNFWVGPGDQIWPDQKIKLKLKTVYMYVAGFYTYSIFALLFWEIRRSDFGISMTHHVATVCLIALSYIFRFARVGSVVLAIHDATDVFLELGKISKYSGHELFADVSFLVFVSSWVLLRLIYYPFWILWSTSYEVVLTLDKEKHKVDGPIYYYVFNSLLFSLLVLHIYWWVLMYRMLVKQIQSRGHVGDDIRSDSEGEEEHED

SEQ ID NO: 41643 - protein, 307 aa, Zea mays subsp. mays
  peptide (1)..(307): Ceres Seq. ID no. 12390145
  misc_feature (92)..(304): Pfam Name: LAG1 Pfam Description: Longevity-assurance protein
  misc_feature (8)..(307): NCBI GI NO: 25518747 NR Description: hypothetical protein F13B4
  misc_feature (8)..(307): NCBI GI NO: 16974114 NR Description: putative resistance protein
  misc_feature (8)..(307): NCBI GI NO: 18404559 NR Description: expressed protein; protein id: At3g25540
  misc_feature (8)..(307): NCBI GI NO: 7688742 NR Description: ASC1 [Lycopersicon esculentum]
  misc_feature (8)..(237): NCBI GI NO: 30683361 NR Description: longevity assurance protein -related
  misc_feature (24)..(304): NCBI GI NO: 15230323 NR Description: longevity factor-like protein
  misc_feature (24)..(304): NCBI GI NO: 7658241 NR Description: LAG1 homolog 2 [Arabidopsis thaliana]
  misc_feature (25)..(303): NCBI GI NO: 34901974 NR Description: unknown protein
  misc_feature (8)..(122): NCBI GI NO: 8920562 NR Description: Contains similarity to LAG1 homolog 1 fromArabidopsis thaliana gb|AF198179
  misc_feature (73)..(300): NCBI GI NO: 21358551 NR Description: Longevity assurance gene 1 CG3576-PB
MAFSPPLIDWEAESYPAYPDFAAIPLFVVFFLVVRFFLDRFVFEWLARKLIFKEEDEKKLGPTTYAGKRKIRKFKESAWKCMYFLSGELLALSVTYNEPWFTTTRNFWVGPGDQIWPDQKIKLKLKTVYMYVAGFYTYSIFALLFWEIRRSDFGISMTHHVATVCLIALSYIFRFARVGSVVLAIHDATDVFLELGKISKYSGHELFADVSFLVFVSSWVLLRLIYYPFWILWSTSYEVVLTLDKEKHKVDGPIYYYVFNSLLFSLLVLHIYWWVLMYRMLVKQIQSRGHVGDDIRSDSEGEEEHED

SEQ ID NO: 41644 - protein, 226 aa, Zea mays subsp. mays
  peptide (1)..(226): Ceres Seq. ID no. 12390146
  misc_feature (11)..(223): Pfam Name: LAG1 Pfam Description: Longevity-assurance protein
  misc_feature (1)..(226): NCBI GI NO: 25518747 NR Description: hypothetical protein F13B4
  misc_feature (1)..(226): NCBI GI NO: 16974114 NR Description: putative resistance protein
  misc_feature (1)..(226): NCBI GI NO: 18404559 NR Description: expressed protein; protein id: At3g25540
  misc_feature (1)..(226): NCBI GI NO: 7688742 NR Description: ASC1 [Lycopersicon esculentum]
  misc_feature (1)..(156): NCBI GI NO: 30683361 NR Description: longevity assurance protein -related
  misc_feature (1)..(223): NCBI GI NO: 15230323 NR Description: longevity factor-like protein
  misc_feature (1)..(223): NCBI GI NO: 7658241 NR Description: LAG1 homolog 2 [Arabidopsis thaliana]
  misc_feature (1)..(222): NCBI GI NO: 34901974 NR Description: unknown protein
  misc_feature (1)..(41): NCBI GI NO: 8920562 NR Description: Contains similarity to LAG1 homolog 1 fromArabidopsis thaliana gb|AF198179
  misc_feature (1)..(219): NCBI GI NO: 21358551 NR Description: Longevity assurance gene 1 CG3576-PB
MYFLSGELLALSVTYNEPWFTTTRNFWVGPGDQIWPDQKIKLKLKTVYMYVAGFYTYSIFALLFWEIRRSDFGISMTHHVATVCLIALSYIFRFARVGSVVLAIHDATDVFLELGKISKYSGHELFADVSFLVFVSSWVLLRLIYYPFWILWSTSYEVVLTLDKEKHKVDGPIYYYVFNSLLFSLLVLHIYWWVLMYRMLVKQIQSRGHVGDDIRSDSEGEEEHED

SEQ ID NO: 41645 - DNA, 1705 bp, Zea mays subsp. mays
  misc_feature (1)..(1705): Ceres Seq. ID no. 12381724
gcacgagaccattacctagaacatcctaatcgaaaaaagttgcaaccggagtccggagcatagcaacctcgctgggctcgggcccgcggcgccgggatatactccagggaagtcgagcaaggagagtgtggactgtggacgacaggggtaaagatcgagtgagcatcgctgcaccatgcgcccttctctctgctgtgcacctctttttcttctgctactattacatttggcatttgctagacctctctttcctctaccgagtaagacaaagaatgaagagaagaagcccatacagacgtttcggccatataacattgctcatcgtggatcaaatggggaaattcccgaggaaacagctgctgcatacatgagagctattgaagaaggggccgattttatagagtctgacatccttgctagcaaagatggggccttgatttgttttcatgatgtaacacttgatgatacaactgatgttgccaagcgtaaggaatttgccaatcgaagaagaacctatgaagtggagtggtttaatgttactggatggtttgtagtggacttcacactggaggaacttaaaacacttagagtgaagcagagatactcgtttagagatcaacaatacaatggtatgttttcaatcatcacgtttgaagaattcatttcaattgccctagatgcagacagaactgtcggcatatatcccgagattaaagatccagtttttatcaacaagcatgtcaagtgggctgatgggaagaagtttgaggacaaatttgtggataccttgcttaaatatggatacaaaggtcaatatatgtcagagaattggctgaagcagccattgtttatacaatcctttgctcccacctccattgtacatgtatcagattttattgactctcccaaggtatttttgattgatgatatcagtgtgagaacacaagacacgaaccagtcatactgggaaattacttcagatgaataccttgcatacattagtaaatatgtcgttggccttggtccatggaaggacactattgttccagcttcaggaaactacttgatgccacctagtgatcttgtcgcacgggcacatgctcataatctccaggtacatccatacacgtacaggaacgagaaccagttcctgcacttcaacttttttcaagatccctacaatgaatacgacttctggataaacactgtgggggttgatggactgtttacagatttcaccggaacccttcacaggtaccaagaattgacatccccacaccggaaggatgagactgcaaatagcctcctagtaaaaattagccaaatgatctcagcatatgaaggtctctgatcagcacgacgttgctgaaaattgtttgtgcttttgttaatcgatctgcaagagcacacgatccattcatcacggacggactgcgactttgcaaggtgaaataaacgagttgtttctggttgggacttgttagcacgagccgtactctccattaaagctcttaaaccctgtgagaaatttctagtgtgggaatacttgttttcgggaaggtactgtaatgactagttcacgatagaaaccgtatcatggtttagcgtgccaggatggacgagttggtctcgggtctttgcacagttggcctacaattgtacttgccggagtgttgaaatttctagtgtgggaataatcgttttc

SEQ ID NO: 41646 - protein, 391 aa, Zea mays subsp. mays
  peptide (1)..(391): Ceres Seq. ID no. 12381725
  misc_feature (1)..(390): NCBI GI NO: 34909788 NR Description: putative glycerophosphoryl diesterphosphodiesterase
  misc_feature (9)..(367): NCBI GI NO: 15241502 NR Description: glycerophosphodiester phosphodiesterase
  misc_feature (7)..(388): NCBI GI NO: 15221164 NR Description: putative glycerophosphodiester phosphodiesterase
  misc_feature (19)..(370): NCBI GI NO: 34394918 NR Description: putative glycerophosphoryl diesterphosphodiesterase
  misc_feature (39)..(354): NCBI GI NO: 23126501 NR Description: hypothetical protein [Nostoc punctiforme]
  misc_feature (10)..(353): NCBI GI NO: 32997080 NR Description: glycerophosphoryl diester phosphodiesterase
  misc_feature (43)..(357): NCBI GI NO: 29833326 NR Description: putative glycerophosphoryl diesterphosphodiesterase
  misc_feature (40)..(354): NCBI GI NO: 16127502 NR Description: glycerophosphoryl diester phosphodiesterase
  misc_feature (44)..(363): NCBI GI NO: 15595544 NR Description: glycerophosphoryl diester phosphodiesterase
  misc_feature (2)..(353): NCBI GI NO: 23105793 NR Description: hypothetical protein [Azotobacter vinelandii]
MRPSLCCAPLFLLLLLHLAFARPLFPLPSKTKNEEKKPIQTFRPYNIAHRGSNGEIPEETAAAYMRAIEEGADFIESDILASKDGALICFHDVTLDDTTDVAKRKEFANRRRTYEVEWFNVTGWFVVDFTLEELKTLRVKQRYSFRDQQYNGMFSIITFEEFISIALDADRTVGIYPEIKDPVFINKHVKWADGKKFEDKFVDTLLKYGYKGQYMSENWLKQPLFIQSFAPTSIVHVSDFIDSPKVFLIDDISVRTQDTNQSYWEITSDEYLAYISKYVVGLGPWKDTIVPASGNYLMPPSDLVARAHAHNLQVHPYTYRNENQFLHFNFFQDPYNEYDFWINTVGVDGLFTDFTGTLHRYQELTSPHRKDETANSLLVKISQMISAYEGL

SEQ ID NO: 41647 - protein, 327 aa, Zea mays subsp. mays
  peptide (1)..(327): Ceres Seq. ID no. 12381726
  misc_feature (1)..(326): NCBI GI NO: 34909788 NR Description: putative glycerophosphoryl diesterphosphodiesterase
  misc_feature (1)..(303): NCBI GI NO: 15241502 NR Description: glycerophosphodiester phosphodiesterase
  misc_feature (1)..(324): NCBI GI NO: 15221164 NR Description: putative glycerophosphodiester phosphodiesterase
  misc_feature (1)..(306): NCBI GI NO: 34394918 NR Description: putative glycerophosphoryl diesterphosphodiesterase
  misc_feature (1)..(290): NCBI GI NO: 23126501 NR Description: hypothetical protein [Nostoc punctiforme]
  misc_feature (1)..(289): NCBI GI NO: 32997080 NR Description: glycerophosphoryl diester phosphodiesterase
  misc_feature (1)..(293): NCBI GI NO: 29833326 NR Description: putative glycerophosphoryl diesterphosphodiesterase
  misc_feature (1)..(290): NCBI GI NO: 16127502 NR Description: glycerophosphoryl diester phosphodiesterase
  misc_feature (1)..(299): NCBI GI NO: 15595544 NR Description: glycerophosphoryl diester phosphodiesterase
  misc_feature (1)..(289): NCBI GI NO: 23105793 NR Description: hypothetical protein [Azotobacter vinelandii]
MRAIEEGADFIESDILASKDGALICFHDVTLDDTTDVAKRKEFANRRRTYEVEWFNVTGWFVVDFTLEELKTLRVKQRYSFRDQQYNGMFSIITFEEFISIALDADRTVGIYPEIKDPVFINKHVKWADGKKFEDKFVDTLLKYGYKGQYMSENWLKQPLFIQSFAPTSIVHVSDFIDSPKVFLIDDISVRTQDTNQSYWEITSDEYLAYISKYVVGLGPWKDTIVPASGNYLMPPSDLVARAHAHNLQVHPYTYRNENQFLHFNFFQDPYNEYDFWINTVGVDGLFTDFTGTLHRYQELTSPHRKDETANSLLVKISQMISAYEGL

SEQ ID NO: 41648 - protein, 239 aa, Zea mays subsp. mays
  peptide (1)..(239): Ceres Seq. ID no. 12381727
  misc_feature (1)..(238): NCBI GI NO: 34909788 NR Description: putative glycerophosphoryl diesterphosphodiesterase
  misc_feature (1)..(215): NCBI GI NO: 15241502 NR Description: glycerophosphodiester phosphodiesterase
  misc_feature (1)..(236): NCBI GI NO: 15221164 NR Description: putative glycerophosphodiester phosphodiesterase
  misc_feature (1)..(218): NCBI GI NO: 34394918 NR Description: putative glycerophosphoryl diesterphosphodiesterase
  misc_feature (1)..(202): NCBI GI NO: 23126501 NR Description: hypothetical protein [Nostoc punctiforme]
  misc_feature (1)..(201): NCBI GI NO: 32997080 NR Description: glycerophosphoryl diester phosphodiesterase
  misc_feature (1)..(205): NCBI GI NO: 29833326 NR Description: putative glycerophosphoryl diesterphosphodiesterase
  misc_feature (1)..(202): NCBI GI NO: 16127502 NR Description: glycerophosphoryl diester phosphodiesterase
  misc_feature (1)..(211): NCBI GI NO: 15595544 NR Description: glycerophosphoryl diester phosphodiesterase
  misc_feature (1)..(201): NCBI GI NO: 23105793 NR Description: hypothetical protein [Azotobacter vinelandii]
MFSIITFEEFISIALDADRTVGIYPEIKDPVFINKHVKWADGKKFEDKFVDTLLKYGYKGQYMSENWLKQPLFIQSFAPTSIVHVSDFIDSPKVFLIDDISVRTQDTNQSYWEITSDEYLAYISKYVVGLGPWKDTIVPASGNYLMPPSDLVARAHAHNLQVHPYTYRNENQFLHFNFFQDPYNEYDFWINTVGVDGLFTDFTGTLHRYQELTSPHRKDETANSLLVKISQMISAYEGL

SEQ ID NO: 41649 - DNA, 1458 bp, Zea mays subsp. mays
  misc_feature (1)..(1458): Ceres Seq. ID no. 12382366
agcctaggttagtgtctaacatcgtcgatccctccatgaagatcctacaaatctagctacgtagctagcgatcgatcgaattccatatcattgtttactcagacacatcatcagctacgtaactgcgtcagcttctggttgatcggatcgcgtccatggctgcggcggccgggggcggcaggcggccgtgggtggtggacgtggagaagaagctgggcgaggcggacgcgtcggtggaggtgtcgcggtggcagcggcactgcatctaccgcgtcccggcgtgcatcaaggacctgaagcccaaggcgtacaagccgcaggtggtgtcgctgggccccttccaccacggcgacgcggagctggttcccatggaggagcacaagcggcgggcgctgcgtcacctcctgcgccgcgccaagaggccgctggaggacttcgtggccgccgtggaggagatcgcggagccgctggagagcgcgtacctggacctcggcgccgagtggcgcggcggcgggagggagcggttcctggaggtgatgatcgtcgacggctgcttcctgctggaggtgatgagagccaccgtcctcgacgggaagaacaccgccgactacgcgcccaacgaccccatcttcagccaccacggggtgctgtacatggtgccgtacatccgccgcgacatgctcatgctcgagaaccagctcccgctcatcctgctcgagaagctcgtcgccgtcgagactggcaagcctacgaacggcgatgccatcaacaggatggtgctgaggttcctgtccccgacaccgcggctaccacccaccggcgtcggcatcgggctccacgcgctggacgtgcaaccgccggaacatgctgtacgggcactaccagcaccgcccccggcgcgacgtgccggagacggacatcatccggtccgcggtggagctgtacgaggccgggatccggttcaggaagagcgtctcggacagcctgcacgacatccggttccggcacggcgtgctgagcatgccggcggtgacggtggacgactccaccgagtacatgttcctgctcgtcatgaccgtcatgcagaccgtctacaccgtcatgcaattctaccagggcggcggcagcggcagtgacggcggatcgtcggcggcgccggcgccggcgtgatgatcgatctctgcactgcagccttttgattgcattggtctgcatgcgtgatctgtttgagcttgttttgatcgcgttcctttttcttgaggtatatcgattggttgtgtacttgtgtgtgttgattcttgtcgtggattccagttgttgatttctcctttttcggtctctttccgagtttgtttctatatttgaattaacgggttttcaaattatggaaaaaggaccatatgtgaaacacaactgtaaacagagaagatgatctgtaaggctatgtttggtttcttc

SEQ ID NO: 41650 - protein, 326 aa, Zea mays subsp. mays
  peptide (1)..(326): Ceres Seq. ID no. 12382367
  misc_feature (32)..(222): Pfam Name: Pfam Description:  Plant protein of unknown function
  misc_feature (12)..(232): NCBI GI NO: 38636935 NR Description: hypothetical protein
  misc_feature (12)..(222): NCBI GI NO: 15229687 NR Description: putative protein; protein id: At3g50170.1
  misc_feature (9)..(221): NCBI GI NO: 15229681 NR Description: putative protein; protein id: At3g50130.1
  misc_feature (9)..(215): NCBI GI NO: 15229684 NR Description: putative protein; protein id: At3g50150.1
  misc_feature (9)..(221): NCBI GI NO: 15229680 NR Description: putative protein; protein id: At3g50120.1
  misc_feature (9)..(232): NCBI GI NO: 15229686 NR Description: putative protein; protein id: At3g50160.1
  misc_feature (1)..(232): NCBI GI NO: 15229689 NR Description: putative protein; protein id: At3g50180.1
  misc_feature (9)..(185): NCBI GI NO: 15229691 NR Description: putative protein; protein id: At3g50190.1
  misc_feature (9)..(221): NCBI GI NO: 15229682 NR Description: putative protein; protein id: At3g50140.1
  misc_feature (12)..(285): NCBI GI NO: 32490273 NR Description: OSJNBb0116K07.15
MAAAAGGGRRPWVVDVEKKLGEADASVEVSRWQRHCIYRVPACIKDLKPKAYKPQVVSLGPFHHGDAELVPMEEHKRRALRHLLRRAKRPLEDFVAAVEEIAEPLESAYLDLGAEWRGGGRERFLEVMIVDGCFLLEVMRATVLDGKNTADYAPNDPIFSHHGVLYMVPYIRRDMLMLENQLPLILLEKLVAVETGKPTNGDAINRMVLRFLSPTPRLPPTGVGIGLHALDVQPPEHAVRALPAPPPARRAGDGHHPVRGGAVRGRDPVQEERLGQPARHPVPARRAEHAGGDGGRLHRVHVPARHDRHADRLHRHAILPGRRQRQ

SEQ ID NO: 41651 - protein, 255 aa, Zea mays subsp. mays
  peptide (1)..(255): Ceres Seq. ID no. 12382368
  misc_feature (1)..(151): Pfam Name: Pfam Description:  Plant protein of unknown function
  misc_feature (1)..(161): NCBI GI NO: 38636935 NR Description: hypothetical protein
  misc_feature (1)..(151): NCBI GI NO: 15229687 NR Description: putative protein; protein id: At3g50170.1
  misc_feature (1)..(150): NCBI GI NO: 15229681 NR Description: putative protein; protein id: At3g50130.1
  misc_feature (1)..(144): NCBI GI NO: 15229684 NR Description: putative protein; protein id: At3g50150.1
  misc_feature (1)..(150): NCBI GI NO: 15229680 NR Description: putative protein; protein id: At3g50120.1
  misc_feature (1)..(161): NCBI GI NO: 15229686 NR Description: putative protein; protein id: At3g50160.1
  misc_feature (1)..(161): NCBI GI NO: 15229689 NR Description: putative protein; protein id: At3g50180.1
  misc_feature (1)..(114): NCBI GI NO: 15229691 NR Description: putative protein; protein id: At3g50190.1
  misc_feature (1)..(150): NCBI GI NO: 15229682 NR Description: putative protein; protein id: At3g50140.1
  misc_feature (1)..(214): NCBI GI NO: 32490273 NR Description: OSJNBb0116K07.15
MEEHKRRALRHLLRRAKRPLEDFVAAVEEIAEPLESAYLDLGAEWRGGGRERFLEVMIVDGCFLLEVMRATVLDGKNTADYAPNDPIFSHHGVLYMVPYIRRDMLMLENQLPLILLEKLVAVETGKPTNGDAINRMVLRFLSPTPRLPPTGVGIGLHALDVQPPEHAVRALPAPPPARRAGDGHHPVRGGAVRGRDPVQEERLGQPARHPVPARRAEHAGGDGGRLHRVHVPARHDRHADRLHRHAILPGRRQRQ

SEQ ID NO: 41652 - protein, 199 aa, Zea mays subsp. mays
  peptide (1)..(199): Ceres Seq. ID no. 12382369
  misc_feature (1)..(95): Pfam Name: Pfam Description:  Plant protein of unknown function
  misc_feature (1)..(105): NCBI GI NO: 38636935 NR Description: hypothetical protein
  misc_feature (1)..(95): NCBI GI NO: 15229687 NR Description: putative protein; protein id: At3g50170.1
  misc_feature (1)..(94): NCBI GI NO: 15229681 NR Description: putative protein; protein id: At3g50130.1
  misc_feature (1)..(88): NCBI GI NO: 15229684 NR Description: putative protein; protein id: At3g50150.1
  misc_feature (1)..(94): NCBI GI NO: 15229680 NR Description: putative protein; protein id: At3g50120.1
  misc_feature (1)..(105): NCBI GI NO: 15229686 NR Description: putative protein; protein id: At3g50160.1
  misc_feature (1)..(105): NCBI GI NO: 15229689 NR Description: putative protein; protein id: At3g50180.1
  misc_feature (1)..(58): NCBI GI NO: 15229691 NR Description: putative protein; protein id: At3g50190.1
  misc_feature (1)..(94): NCBI GI NO: 15229682 NR Description: putative protein; protein id: At3g50140.1
  misc_feature (1)..(158): NCBI GI NO: 32490273 NR Description: OSJNBb0116K07.15
MIVDGCFLLEVMRATVLDGKNTADYAPNDPIFSHHGVLYMVPYIRRDMLMLENQLPLILLEKLVAVETGKPTNGDAINRMVLRFLSPTPRLPPTGVGIGLHALDVQPPEHAVRALPAPPPARRAGDGHHPVRGGAVRGRDPVQEERLGQPARHPVPARRAEHAGGDGGRLHRVHVPARHDRHADRLHRHAILPGRRQRQ

SEQ ID NO: 41653 - DNA, 446 bp, Zea mays subsp. mays
  misc_feature (1)..(446): Ceres Seq. ID no. 14305948
aggacggagatgacgcagaagcagaccctgttcaaggggcagagcaagaagaagactatccctcccaaccgccacggcaaggcgcctcatgttcgtaaaggaaagagagccgtcaagcccaccaagttcacaaaggacatggacgccgagaaggaactcaccaagttcatcaaccagtgcaacgaaataaaagctgcgaatcttgctagcaaagagggcggtgacctcaacatagtgaaggcggatggtgaggaatctaaatcaaagaaataggaagccagaaactgaaaacgagtgtgtgaaacgtgatgcgtggtaaactgttaatgcgatgtattctgctgaagaaaattcagttccgtatggctgggtagatgaacatgtttagcgcaaagtgacggtgtaactgcaaccggggtaatggcttgcaagttttgttctggccc

SEQ ID NO: 41654 - protein, 90 aa, Zea mays subsp. mays
  peptide (1)..(90): Ceres Seq. ID no. 14305949
  misc_feature (4)..(88): NCBI GI NO: 34903208 NR Description: unnamed protein product
  misc_feature (4)..(90): NCBI GI NO: 15231119 NR Description: expressed protein [Arabidopsis thaliana]
RTEMTQKQTLFKGQSKKKTIPPNRHGKAPHVRKGKRAVKPTKFTKDMDAEKELTKFINQCNEIKAANLASKEGGDLNIVKADGEESKSKK

SEQ ID NO: 41655 - protein, 87 aa, Zea mays subsp. mays; identical to SEQ ID NO: 21739
  peptide (1)..(87): Ceres Seq. ID no. 14305950
  misc_feature (1)..(85): NCBI GI NO: 34903208 NR Description: unnamed protein product
  misc_feature (1)..(87): NCBI GI NO: 15231119 NR Description: expressed protein [Arabidopsis thaliana]

SEQ ID NO: 41656 - DNA, 376 bp, Zea mays subsp. mays
  misc_feature (1)..(376): Ceres Seq. ID no. 12467650
caagagaagctgatatagcaatattggaagaaccagaacatctcaattggtatcatcatgggaaacgctggactgacaagttcaaccatgttgttggtgtagttcatacaaactacctggaatatatcaagagagagaagaatggagctcttcaggcctttctagttaaacacatcaacaattgggtgaccagagcatactgcgacaaggtcttacgtctttctgcagcaactcaagatttaccaaagtctattgtttgcaatgttcatggtgttaacccaaagttcctgaagattggagaagaaataactgccaatagggggagtggggagaacaccactgtgacttgttaaatctgtatgcttattcccactcc

SEQ ID NO: 41657 - protein, 116 aa, Zea mays subsp. mays
  peptide (1)..(116): Ceres Seq. ID no. 12467651
  misc_feature (2)..(112): NCBI GI NO: 38344037 NR Description: OJ991214_12.18
  misc_feature (1)..(110): NCBI GI NO: 30681840 NR Description: digalactosyldiacylglycerol synthase 1
  misc_feature (1)..(110): NCBI GI NO: 15229824 NR Description: digalactosyldiacylglycerol synthase
  misc_feature (1)..(109): NCBI GI NO: 27542603 NR Description: digalactosyldiacylglycerol synthase
  misc_feature (2)..(100): NCBI GI NO: 34902044 NR Description: name [Oryza sativa (japonica cultivar-group)]
  misc_feature (2)..(99): NCBI GI NO: 7486557 NR Description: hypothetical protein F6N23
  misc_feature (2)..(99): NCBI GI NO: 22328179 NR Description: similar to digalactosyldiacylglycerol
READIAILEEPEHLNWYHHGKRWTDKFNHVVGVVHTNYLEYIKREKNGALQAFLVKHINNWVTRAYCDKVLRLSAATQDLPKSIVCNVHGVNPKFLKIGEEITANRGSGENTTVTC

SEQ ID NO: 41658 - DNA, 443 bp, Zea mays subsp. mays
  misc_feature (1)..(443): Ceres Seq. ID no. 4614034
atctgaaacaagaagctttcgcaagctggccagctagctccctaccgactagataccgaggagtgacggatcaggatgggaggggtgacctcgagtgtggcggcgaagatggccttcttcccgccgacgccgccgtcgtacgcgctggtggaggacgccggtgcgggggtcaccacgctcagcggccagccgcaccgggagaacgtcgagttgctgcgcttccgcacccgcaaagggaacacgctggcggcgatgtacgtgcgccacccggacgccgcgtccacggtgctctattcccacggcaacgccgcggacctgggccacctctaccagctcttcctgcatctgtccttcaacctccgcgttaacatcctcgggtatgactattcaggatatgggcaatcatcaggaaagccgagtgaacacaatacttatgctgacat

SEQ ID NO: 41659 - protein, 122 aa, Zea mays subsp. mays
  peptide (1)..(122): Ceres Seq. ID no. 4614035
  misc_feature (1)..(121): NCBI GI NO: 15232168 NR Description: unknown protein; protein id: At3g01690.1
  misc_feature (1)..(121): NCBI GI NO: 15241394 NR Description: putative protein; protein id: At5g14390
  misc_feature (1)..(121): NCBI GI NO: 15233975 NR Description: putative protein; protein id: At4g24760
  misc_feature (1)..(121): NCBI GI NO: 18175921 NR Description: unknown protein [Arabidopsis thaliana]
  misc_feature (1)..(121): NCBI GI NO: 10177798 NR Description: emb|CAB87778
  misc_feature (1)..(121): NCBI GI NO: 15240861 NR Description: putative protein; protein id: At5g38220.1
  misc_feature (1)..(121): NCBI GI NO: 22330474 NR Description: hypothetical protein; protein id: At1g66900
  misc_feature (1)..(121): NCBI GI NO: 25404647 NR Description: hypothetical protein T4O24.3
  misc_feature (1)..(121): NCBI GI NO: 15230760 NR Description: unknown protein; protein id: At3g30380.1
  misc_feature (2)..(121): NCBI GI NO: 34905260 NR Description: P0577B11.1
MGGVTSSVAAKMAFFPPTPPSYALVEDAGAGVTTLSGQPHRENVELLRFRTRKGNTLAAMYVRHPDAASTVLYSHGNAADLGHLYQLFLHLSFNLRVNILGYDYSGYGQSSGKPSEHNTYAD

SEQ ID NO: 41660 - protein, 121 aa, Zea mays subsp. mays
  peptide (1)..(121): Ceres Seq. ID no. 4614036
LKQEAFASWPASSLPTRYRGVTDQDGRGDLECGGEDGLLPADAAVVRAGGGRRCGGHHAQRPAAPGERRVAALPHPQREHAGGDVRAPPGRRVHGALFPRQRRGPGPPLPALPASVLQPPR

SEQ ID NO: 41661 - protein, 111 aa, Zea mays subsp. mays
  peptide (1)..(111): Ceres Seq. ID no. 4614037
  misc_feature (1)..(110): NCBI GI NO: 15232168 NR Description: unknown protein; protein id: At3g01690.1
  misc_feature (1)..(110): NCBI GI NO: 15241394 NR Description: putative protein; protein id: At5g14390
  misc_feature (1)..(110): NCBI GI NO: 15233975 NR Description: putative protein; protein id: At4g24760
  misc_feature (1)..(110): NCBI GI NO: 18175921 NR Description: unknown protein [Arabidopsis thaliana]
  misc_feature (1)..(110): NCBI GI NO: 10177798 NR Description: emb|CAB87778
  misc_feature (1)..(110): NCBI GI NO: 15240861 NR Description: putative protein; protein id: At5g38220.1
  misc_feature (1)..(110): NCBI GI NO: 22330474 NR Description: hypothetical protein; protein id: At1g66900
  misc_feature (1)..(110): NCBI GI NO: 25404647 NR Description: hypothetical protein T4O24.3
  misc_feature (1)..(110): NCBI GI NO: 15230760 NR Description: unknown protein; protein id: At3g30380.1
  misc_feature (1)..(110): NCBI GI NO: 34905260 NR Description: P0577B11.1
MAFFPPTPPSYALVEDAGAGVTTLSGQPHRENVELLRFRTRKGNTLAAMYVRHPDAASTVLYSHGNAADLGHLYQLFLHLSFNLRVNILGYDYSGYGQSSGKPSEHNTYAD

SEQ ID NO: 41662 - DNA, 1940 bp, Zea mays subsp. mays
  misc_feature (1)..(1940): Ceres Seq. ID no. 12435492
  misc_feature (365)..(365): n is a, c, t, g, unknown, or other
  misc_feature (344)..(344): n is a, c, t, g, unknown, or other
  misc_feature (362)..(362): n is a, c, t, g, unknown, or other
agtggccgtgggcgccggcggcggctaacaaaagcgccgggaagtgggcaccgaccgaagcatcccggaacagacacagattaccgcttgtatttagatcggcccagaccatctgacgacgaggaggagggcggggaggcgaggccaaatccggtcggactcggaccggcgaactcccccgacctcgctatgggcagcctccgcgtcgtcggctgggcttggaccgccgccgccgcgccggagtggggcgtgcaccgccgctgctgccgcgggacgccgctggcccgcccccgcgcggcgacgtcctcccttggcgcggggcagctccgggtcgggacggagcncgggtggctctgggattnccncggcggcggcggcgcgggggattacgccagggagatggaggtggcggtgcgcgtcgtgcaggtggcctgcaccctgtgccagcgcgtgcaggactcgctcctccgccccggccccgacgccgccggcggcgacgggcgcgtccacgccaagctcgaccgctcccccgtaaccgtcgctgattggggtgttcaagcgatagtaagctggctgctttccagttcctttcatgatgaggacatatcgatcattgccgaagaagatgatgagacactatctagtagtgacggtgtaactttgcttgaatctgttgttgaggctgtcaacggctgcctggttgaagctccaaactatgggctgagatcccctgagaaagagctcagagctcatgatgttattcaagccatacggaaatgcagctctactggaggcccgaaaggaagattttgggtgcttgatcctgtcgacggcacccttgggtttgtgagaggggaccaatatgctattgctctagccttgattgaagatggagaagttatacttggtgttcttgggtgcccaaattatccaatgaaaaaggagtggctcaattaccatcaaaagtactataggttgatgtctaaggttgctcctcctccattggggtcctggcataaaggttgtgtgatgtatgcccagaaaggatgtggccaagcttggatgcaaccactggttcacgacttcggtaagcttaattggcaccacccaagggagattcaagtatcatccatcagtgatccaatctcagctacgttctgtgaaccagttgagaaagctaactcaagccattccttcacagcaggacttgctcaaagtgtaggattaaggaatcaacctctgcgcgtgtacagcatggtgaaatatgctgcaatagcacgaggcgatgctgaaatcttcatgaaatttgcaagagctggatacaaagagaagatatgggatcatgctgcaggggtggttatcattcaggaggctggtggagtggtcacagatgctggtggccgcccattggacttctcaaggggtgtttacctggaaggtttggatcgaggcataatagcttgttccggagcattgcttcatcaaagaattttaaatgctgttgatgcgagctggaactcatcaacactatgaaccaaacaataaggtcttaggagagaatggcctcatgttggtcatagcatggtaaattggaaaactgatttaagtattcattgtggtgctgttgtgactatggggtaacaccgtaacagtgcagcatataggatagtaatagattgtctgctcatataaacaagaagtcgtctcttgaggctgacaaattgctggcttttgttcaacgatgccatatgtaattttgtataggtgtctgttgatgaaaagcatgtgtgcatgcttttgtttttactaattgacatgtttcttttcaacttgtgcctgtcaatcgtcaggtgtattggttaagacagtgcagcaccatttgctgacaatcataatgttaaaaccttcaactgattcatcaaatgagttattgtccgcct

SEQ ID NO: 41663 - protein, 510 aa, Zea mays subsp. mays
  peptide (1)..(510): Ceres Seq. ID no. 12435493
  misc_feature (62)..(510): NCBI GI NO: 15451579 NR Description: Putative PAP-specific phosphatase [Oryza sativa]
  misc_feature (133)..(510): NCBI GI NO: 15239631 NR Description: putative protein; protein id: At5g54390
  misc_feature (133)..(510): NCBI GI NO: 2736075 NR Description: PAP-specific phosphatase; HAL2-like protein
  misc_feature (130)..(312): NCBI GI NO: 15237567 NR Description: 3
  misc_feature (341)..(501): NCBI GI NO: 15237567 NR Description: 3
  misc_feature (130)..(312): NCBI GI NO: 14268820 NR Description: diphosphonucleotide phosphatase 1 [Zea mays]
  misc_feature (341)..(501): NCBI GI NO: 14268820 NR Description: diphosphonucleotide phosphatase 1 [Zea mays]
  misc_feature (326)..(504): NCBI GI NO: 34395640 NR Description: Probable SAL4 phosphatase
  misc_feature (130)..(308): NCBI GI NO: 34395640 NR Description: Probable SAL4 phosphatase
  misc_feature (127)..(309): NCBI GI NO: 3913517 NR Description: 3'
  misc_feature (115)..(115): Xaa is any aa, unknown or other
  misc_feature (121)..(121): Xaa is any aa, unknown or other
  misc_feature (122)..(122): Xaa is any aa, unknown or other
SGRGRRRRLTKAPGSGHRPKHPGTDTDYRLYLDRPRPSDDEEEGGEARPNPVGLGPANSPDLAMGSLRVVGWAWTAAAAPEWGVHRRCCRGTPLARPRAATSSLGAGQLRVGTEXGWLWDXXGGGGAGDYAREMEVAVRVVQVACTLCQRVQDSLLRPGPDAAGGDGRVHAKLDRSPVTVADWGVQAIVSWLLSSSFHDEDISIIAEEDDETLSSSDGVTLLESVVEAVNGCLVEAPNYGLRSPEKELRAHDVIQAIRKCSSTGGPKGRFWVLDPVDGTLGFVRGDQYAIALALIEDGEVILGVLGCPNYPMKKEWLNYHQKYYRLMSKVAPPPLGSWHKGCVMYAQKGCGQAWMQPLVHDFGKLNWHHPREIQVSSISDPISATFCEPVEKANSSHSFTAGLAQSVGLRNQPLRVYSMVKYAAIARGDAEIFMKFARAGYKEKIWDHAAGVVIIQEAGGVVTDAGGRPLDFSRGVYLEGLDRGIIACSGALLHQRILNAVDASWNSSTL

SEQ ID NO: 41664 - protein, 447 aa, Zea mays subsp. mays
  peptide (1)..(447): Ceres Seq. ID no. 12435494
  misc_feature (1)..(447): NCBI GI NO: 15451579 NR Description: Putative PAP-specific phosphatase [Oryza sativa]
  misc_feature (70)..(447): NCBI GI NO: 15239631 NR Description: putative protein; protein id: At5g54390
  misc_feature (70)..(447): NCBI GI NO: 2736075 NR Description: PAP-specific phosphatase; HAL2-like protein
  misc_feature (67)..(249): NCBI GI NO: 15237567 NR Description: 3
  misc_feature (278)..(438): NCBI GI NO: 15237567 NR Description: 3
  misc_feature (67)..(249): NCBI GI NO: 14268820 NR Description: diphosphonucleotide phosphatase 1 [Zea mays]
  misc_feature (278)..(438): NCBI GI NO: 14268820 NR Description: diphosphonucleotide phosphatase 1 [Zea mays]
  misc_feature (263)..(441): NCBI GI NO: 34395640 NR Description: Probable SAL4 phosphatase
  misc_feature (67)..(245): NCBI GI NO: 34395640 NR Description: Probable SAL4 phosphatase
  misc_feature (64)..(246): NCBI GI NO: 3913517 NR Description: 3'
  misc_feature (52)..(52): Xaa is any aa, unknown or other
  misc_feature (58)..(58): Xaa is any aa, unknown or other
  misc_feature (59)..(59): Xaa is any aa, unknown or other
MGSLRVVGWAWTAAAAPEWGVHRRCCRGTPLARPRAATSSLGAGQLRVGTEXGWLWDXXGGGGAGDYAREMEVAVRVVQVACTLCQRVQDSLLRPGPDAAGGDGRVHAKLDRSPVTVADWGVQAIVSWLLSSSFHDEDISIIAEEDDETLSSSDGVTLLESVVEAVNGCLVEAPNYGLRSPEKELRAHDVIQAIRKCSSTGGPKGRFWVLDPVDGTLGFVRGDQYAIALALIEDGEVILGVLGCPNYPMKKEWLNYHQKYYRLMSKVAPPPLGSWHKGCVMYAQKGCGQAWMQPLVHDFGKLNWHHPREIQVSSISDPISATFCEPVEKANSSHSFTAGLAQSVGLRNQPLRVYSMVKYAAIARGDAEIFMKFARAGYKEKIWDHAAGVVIIQEAGGVVTDAGGRPLDFSRGVYLEGLDRGIIACSGALLHQRILNAVDASWNSSTL

SEQ ID NO: 41665 - protein, 377 aa, Zea mays subsp. mays
  peptide (1)..(377): Ceres Seq. ID no. 12435495
  misc_feature (1)..(377): NCBI GI NO: 15451579 NR Description: Putative PAP-specific phosphatase [Oryza sativa]
  misc_feature (1)..(377): NCBI GI NO: 15239631 NR Description: putative protein; protein id: At5g54390
  misc_feature (1)..(377): NCBI GI NO: 2736075 NR Description: PAP-specific phosphatase; HAL2-like protein
  misc_feature (1)..(179): NCBI GI NO: 15237567 NR Description: 3
  misc_feature (208)..(368): NCBI GI NO: 15237567 NR Description: 3
  misc_feature (1)..(179): NCBI GI NO: 14268820 NR Description: diphosphonucleotide phosphatase 1 [Zea mays]
  misc_feature (208)..(368): NCBI GI NO: 14268820 NR Description: diphosphonucleotide phosphatase 1 [Zea mays]
  misc_feature (193)..(371): NCBI GI NO: 34395640 NR Description: Probable SAL4 phosphatase
  misc_feature (1)..(175): NCBI GI NO: 34395640 NR Description: Probable SAL4 phosphatase
  misc_feature (1)..(176): NCBI GI NO: 3913517 NR Description: 3'
MEVAVRVVQVACTLCQRVQDSLLRPGPDAAGGDGRVHAKLDRSPVTVADWGVQAIVSWLLSSSFHDEDISIIAEEDDETLSSSDGVTLLESVVEAVNGCLVEAPNYGLRSPEKELRAHDVIQAIRKCSSTGGPKGRFWVLDPVDGTLGFVRGDQYAIALALIEDGEVILGVLGCPNYPMKKEWLNYHQKYYRLMSKVAPPPLGSWHKGCVMYAQKGCGQAWMQPLVHDFGKLNWHHPREIQVSSISDPISATFCEPVEKANSSHSFTAGLAQSVGLRNQPLRVYSMVKYAAIARGDAEIFMKFARAGYKEKIWDHAAGVVIIQEAGGVVTDAGGRPLDFSRGVYLEGLDRGIIACSGALLHQRILNAVDASWNSSTL

SEQ ID NO: 41666 - DNA, 1467 bp, Zea mays subsp. mays; identical to SEQ ID NO: 24674
  misc_feature (1)..(1467): Ceres Seq. ID no. 12378238

SEQ ID NO: 41667 - protein, 377 aa, Zea mays subsp. mays; identical to SEQ ID NO: 24675
  peptide (1)..(377): Ceres Seq. ID no. 12378239
  misc_feature (39)..(357): Pfam Name: Pfam Description:  GDSL-like Lipase/Acylhydrolase
  misc_feature (24)..(371): NCBI GI NO: 34903994 NR Description: unnamed protein product
  misc_feature (12)..(371): NCBI GI NO: 34903996 NR Description: unnamed protein product
  misc_feature (19)..(371): NCBI GI NO: 34903986 NR Description: unnamed protein product
  misc_feature (107)..(354): NCBI GI NO: 15237586 NR Description: lipase -like protein; protein id: At5g03980.1
  misc_feature (78)..(361): NCBI GI NO: 25405682 NR Description: hypothetical protein F15I1.7
  misc_feature (11)..(357): NCBI GI NO: 7486718 NR Description: hypothetical protein F8M12
  misc_feature (11)..(357): NCBI GI NO: 7486138 NR Description: hypothetical protein F25I24
  misc_feature (37)..(361): NCBI GI NO: 15220995 NR Description: lipase, putative; protein id: At1g53940.1
  misc_feature (240)..(365): NCBI GI NO: 15228721 NR Description: putative protein; protein id: At3g62280.1
  misc_feature (38)..(351): NCBI GI NO: 25404994 NR Description: protein T4O12.13 [imported] - Arabidopsis thaliana

SEQ ID NO: 41668 - protein, 315 aa, Zea mays subsp. mays; identical to SEQ ID NO: 24676
  peptide (1)..(315): Ceres Seq. ID no. 12378240
  misc_feature (1)..(295): Pfam Name: Pfam Description:  GDSL-like Lipase/Acylhydrolase
  misc_feature (1)..(309): NCBI GI NO: 34903994 NR Description: unnamed protein product
  misc_feature (1)..(309): NCBI GI NO: 34903996 NR Description: unnamed protein product
  misc_feature (1)..(309): NCBI GI NO: 34903986 NR Description: unnamed protein product
  misc_feature (45)..(292): NCBI GI NO: 15237586 NR Description: lipase -like protein; protein id: At5g03980.1
  misc_feature (16)..(299): NCBI GI NO: 25405682 NR Description: hypothetical protein F15I1.7
  misc_feature (1)..(295): NCBI GI NO: 7486718 NR Description: hypothetical protein F8M12
  misc_feature (1)..(295): NCBI GI NO: 7486138 NR Description: hypothetical protein F25I24
  misc_feature (1)..(299): NCBI GI NO: 15220995 NR Description: lipase, putative; protein id: At1g53940.1
  misc_feature (178)..(303): NCBI GI NO: 15228721 NR Description: putative protein; protein id: At3g62280.1
  misc_feature (1)..(289): NCBI GI NO: 25404994 NR Description: protein T4O12.13 [imported] - Arabidopsis thaliana

SEQ ID NO: 41669 - protein, 267 aa, Zea mays subsp. mays; identical to SEQ ID NO: 24677
  peptide (1)..(267): Ceres Seq. ID no. 12378241
  misc_feature (1)..(247): Pfam Name: Pfam Description:  GDSL-like Lipase/Acylhydrolase
  misc_feature (1)..(261): NCBI GI NO: 34903994 NR Description: unnamed protein product
  misc_feature (1)..(261): NCBI GI NO: 34903996 NR Description: unnamed protein product
  misc_feature (1)..(261): NCBI GI NO: 34903986 NR Description: unnamed protein product
  misc_feature (1)..(244): NCBI GI NO: 15237586 NR Description: lipase -like protein; protein id: At5g03980.1
  misc_feature (1)..(251): NCBI GI NO: 25405682 NR Description: hypothetical protein F15I1.7
  misc_feature (1)..(247): NCBI GI NO: 7486718 NR Description: hypothetical protein F8M12
  misc_feature (1)..(247): NCBI GI NO: 7486138 NR Description: hypothetical protein F25I24
  misc_feature (1)..(251): NCBI GI NO: 15220995 NR Description: lipase, putative; protein id: At1g53940.1
  misc_feature (130)..(255): NCBI GI NO: 15228721 NR Description: putative protein; protein id: At3g62280.1
  misc_feature (1)..(241): NCBI GI NO: 25404994 NR Description: protein T4O12.13 [imported] - Arabidopsis thaliana

SEQ ID NO: 41670 - DNA, 377 bp, Zea mays subsp. mays
  misc_feature (1)..(377): Ceres Seq. ID no. 13573995
catcgattttcaaatcgctcagggtagtcagtggatgactatgatacaggcccttgcttcaaggcctgggaggcgaccatacctaaggatcactggcatagatgactcgaattctgctcatgcccgaggtggtggactggatatggttggacagaggttgcacagaatggcccagtcatgtggtctgcccttcgagttcaatgctgtgccagcagctagtcatgaggttgtgtttgaagatctttgtctaagatctggggaggccatcgttgtcaattttgcttatcagctgcatcatactcctgatgagagcgtgggcatagaaaaccatcgtgatagaatactgagaatggtcaagagcctctctcctaaggtgg

SEQ ID NO: 41671 - protein, 125 aa, Zea mays subsp. mays
  peptide (1)..(125): Ceres Seq. ID no. 13573996
  misc_feature (1)..(124): Pfam Name: Pfam Description:  GRAS family transcription factor
  misc_feature (1)..(124): NCBI GI NO: 37533564 NR Description: putative SCARECROW gene regulator-like
  misc_feature (1)..(124): NCBI GI NO: 15238903 NR Description: phytochrome A signal transduction 1 (PAT1)
  misc_feature (1)..(124): NCBI GI NO: 26450054 NR Description: putative SCARECROW gene regulator
  misc_feature (1)..(124): NCBI GI NO: 16930433 NR Description: AT4g17230/dl4650c [Arabidopsis thaliana]
  misc_feature (1)..(124): NCBI GI NO: 7488182 NR Description: probable SCARECROW - Arabidopsis thaliana
  misc_feature (1)..(124): NCBI GI NO: 15236009 NR Description: scarecrow-like transcription factor 13 (SCL13)
  misc_feature (1)..(124): NCBI GI NO: 11358824 NR Description: scarecrow-like protein 13
  misc_feature (1)..(124): NCBI GI NO: 25405382 NR Description: scarecrow-like protein
  misc_feature (1)..(124): NCBI GI NO: 11358827 NR Description: scarecrow-like protein 5
  misc_feature (1)..(124): NCBI GI NO: 14517552 NR Description: F17J6.12/F17J6.12 [Arabidopsis thaliana]
IDFQIAQGSQWMTMIQALASRPGRRPYLRITGIDDSNSAHARGGGLDMVGQRLHRMAQSCGLPFEFNAVPAASHEVVFEDLCLRSGEAIVVNFAYQLHHTPDESVGIENHRDRILRMVKSLSPKV

SEQ ID NO: 41672 - protein, 114 aa, Zea mays subsp. mays
  peptide (1)..(114): Ceres Seq. ID no. 13573997
  misc_feature (1)..(113): Pfam Name: Pfam Description:  GRAS family transcription factor
  misc_feature (1)..(113): NCBI GI NO: 37533564 NR Description: putative SCARECROW gene regulator-like
  misc_feature (1)..(113): NCBI GI NO: 15238903 NR Description: phytochrome A signal transduction 1 (PAT1)
  misc_feature (1)..(113): NCBI GI NO: 26450054 NR Description: putative SCARECROW gene regulator
  misc_feature (1)..(113): NCBI GI NO: 16930433 NR Description: AT4g17230/dl4650c [Arabidopsis thaliana]
  misc_feature (1)..(113): NCBI GI NO: 7488182 NR Description: probable SCARECROW - Arabidopsis thaliana
  misc_feature (1)..(113): NCBI GI NO: 15236009 NR Description: scarecrow-like transcription factor 13 (SCL13)
  misc_feature (1)..(113): NCBI GI NO: 11358824 NR Description: scarecrow-like protein 13
  misc_feature (1)..(113): NCBI GI NO: 14517552 NR Description: F17J6.12/F17J6.12 [Arabidopsis thaliana]
  misc_feature (1)..(113): NCBI GI NO: 11358827 NR Description: scarecrow-like protein 5
  misc_feature (1)..(113): NCBI GI NO: 25405382 NR Description: scarecrow-like protein
MTMIQALASRPGRRPYLRITGIDDSNSAHARGGGLDMVGQRLHRMAQSCGLPFEFNAVPAASHEVVFEDLCLRSGEAIVVNFAYQLHHTPDESVGIENHRDRILRMVKSLSPKV

SEQ ID NO: 41673 - protein, 112 aa, Zea mays subsp. mays
  peptide (1)..(112): Ceres Seq. ID no. 13573998
  misc_feature (1)..(111): Pfam Name: Pfam Description:  GRAS family transcription factor
  misc_feature (1)..(111): NCBI GI NO: 37533564 NR Description: putative SCARECROW gene regulator-like
  misc_feature (1)..(111): NCBI GI NO: 15238903 NR Description: phytochrome A signal transduction 1 (PAT1)
  misc_feature (1)..(111): NCBI GI NO: 26450054 NR Description: putative SCARECROW gene regulator
  misc_feature (1)..(111): NCBI GI NO: 16930433 NR Description: AT4g17230/dl4650c [Arabidopsis thaliana]
  misc_feature (1)..(111): NCBI GI NO: 7488182 NR Description: probable SCARECROW - Arabidopsis thaliana
  misc_feature (1)..(111): NCBI GI NO: 15236009 NR Description: scarecrow-like transcription factor 13 (SCL13)
  misc_feature (1)..(111): NCBI GI NO: 11358824 NR Description: scarecrow-like protein 13
  misc_feature (1)..(111): NCBI GI NO: 14517552 NR Description: F17J6.12/F17J6.12 [Arabidopsis thaliana]
  misc_feature (1)..(111): NCBI GI NO: 25405382 NR Description: scarecrow-like protein
  misc_feature (1)..(111): NCBI GI NO: 11358827 NR Description: scarecrow-like protein 5
MIQALASRPGRRPYLRITGIDDSNSAHARGGGLDMVGQRLHRMAQSCGLPFEFNAVPAASHEVVFEDLCLRSGEAIVVNFAYQLHHTPDESVGIENHRDRILRMVKSLSPKV

SEQ ID NO: 41674 - DNA, 1841 bp, Zea mays subsp. mays
  misc_feature (1)..(1841): Ceres Seq. ID no. 12384305
ctctcgcgctaccgctctcttgaaggaagtctccgtccccgcttctgattcactcccccacatcgccatatgtcgccggaggccggaccaatcatgcggcccgccgaccagctactcctcccgttcctcctcctggccgttgcctccgtcgctgccgccggcggctcgtgggagaatggatatgggagcatcctccgcctcccctcctcgtctccgcgccggttcccccgctccgcggccgtcgacctgatccacgcgctcaacctccaccccgccgacgcgtcccctcccctctccaccgccggcgtagagggcgccctcgcccccgcggggaccctcgtcgagaggcccatccgcatcgcgtccttcgcgaacggaggcgccgccacgtcggtggaggacctcggccaccacgcggggtattaccgcctcgccaacacccacgacgccaggatgttctacttcttcttcgagtcgaggggccacaaggacgaccccgtggtgatctggctcacgggcgggcccggctgcagcagcgagctcgcgctcttctacgagaacggccccttcaacatagcggacaacttgtcgctcgtctggaatgattttggttgggacaaggcatcaaatcttatctatgtcgaccagcccactggaactgggtttagttacagctcggattcgcgtgacactcgccacaacgaagctactattagcaatgatctatatgatttcctgcaggccttttttgctgagcacccaaagtatgctaaaaatgatttcttcataactggggaatcatatgctgggcattacattcctgcctttgcaagtcgtgtgcaccagggaaacaagaacaatgagggcattcacattaacttgaagggttttgctattggcaacggactaacagatccagcaatacagtacaaggcataccctgattacgcattggatatgggattaattacaaaaacacaatttaacaggatcaataaaatagttccaacttgtgaattcgcggtcaagctttgtggtacttctggaactgtatcttgccttgctgcgtactttgtctgcaatacaatattcagtgccatcaggacaatcataggcaataaaaattattacgacatcaggaaaccatgcatcggaagcctatgctatgatttctctaatttggagaaatttctcaacctcaaatctgtcagagagagcctaggggttggagatatagagtttgtttcatgcagcccaactgtctatgaggccatgctattagattggatgaggaaccttgaagttggaatccctgaactccttgagagcgacatcaaagtgttgatttatgctggagagtatgacctcatatgtaactggcttgggaactcaaggtgggtaaactctatggaatggtctggaaaggaagcttttgtgtcctcatccgagaagcccttcacagtcgacgggaaagaagctggcgttctaaagagccacggtcctttgagtttcttgaaggttcacgatgctggtcacatggtacctatggatcaaccgaaggctgctctggagatgctgaagaggtggacttctggaaacctttcggagccatcttcaagctcccagaggcttgattttacaatgtaacaaaacacacatgctgctcatgacatttcgagcatgtacctctggatgtttgtaggctcagaaaaggtcctggtcttaggctctgaaaacctcatctggcgaccatacgttatttaccttgtatgggcgctccgcttgctggtgagacacggtgttacgagttacgactcgatgaacatgtaataaagcttttc

SEQ ID NO: 41675 - protein, 525 aa, Zea mays subsp. mays
  peptide (1)..(525): Ceres Seq. ID no. 12384306
  misc_feature (97)..(525): NCBI GI NO: 34901686 NR Description: carboxypeptidase C cbp31
  misc_feature (97)..(525): NCBI GI NO: 1705667 NR Description: Serine carboxypeptidase-like precursor
  misc_feature (10)..(519): NCBI GI NO: 18447763 NR Description: putative serine carboxypeptidase precursor
  misc_feature (14)..(519): NCBI GI NO: 21901929 NR Description: carboxypeptidase type III [Theobroma cacao]
  misc_feature (42)..(513): NCBI GI NO: 584893 NR Description: Serine carboxypeptidase III precursor
  misc_feature (20)..(523): NCBI GI NO: 2851577 NR Description: Serine carboxypeptidase III precursor (CP-MIII)
  misc_feature (42)..(513): NCBI GI NO: 82620 NR Description: carboxypeptidase C (EC 3.4.16.5) precursor - wheat
  misc_feature (42)..(513): NCBI GI NO: 115874 NR Description: Serine carboxypeptidase III precursor (CP-WIII)
  misc_feature (9)..(513): NCBI GI NO: 6960455 NR Description: serine carboxypeptidase precursor
  misc_feature (104)..(511): NCBI GI NO: 100571 NR Description: carboxypeptidase C (EC 3.4.16.5) - barley
MSPEAGPIMRPADQLLLPFLLLAVASVAAAGGSWENGYGSILRLPSSSPRRFPRSAAVDLIHALNLHPADASPPLSTAGVEGALAPAGTLVERPIRIASFANGGAATSVEDLGHHAGYYRLANTHDARMFYFFFESRGHKDDPVVIWLTGGPGCSSELALFYENGPFNIADNLSLVWNDFGWDKASNLIYVDQPTGTGFSYSSDSRDTRHNEATISNDLYDFLQAFFAEHPKYAKNDFFITGESYAGHYIPAFASRVHQGNKNNEGIHINLKGFAIGNGLTDPAIQYKAYPDYALDMGLITKTQFNRINKIVPTCEFAVKLCGTSGTVSCLAAYFVCNTIFSAIRTIIGNKNYYDIRKPCIGSLCYDFSNLEKFLNLKSVRESLGVGDIEFVSCSPTVYEAMLLDWMRNLEVGIPELLESDIKVLIYAGEYDLICNWLGNSRWVNSMEWSGKEAFVSSSEKPFTVDGKEAGVLKSHGPLSFLKVHDAGHMVPMDQPKAALEMLKRWTSGNLSEPSSSSQRLDFTM

SEQ ID NO: 41676 - protein, 517 aa, Zea mays subsp. mays
  peptide (1)..(517): Ceres Seq. ID no. 12384307
  misc_feature (89)..(517): NCBI GI NO: 34901686 NR Description: carboxypeptidase C cbp31
  misc_feature (89)..(517): NCBI GI NO: 1705667 NR Description: Serine carboxypeptidase-like precursor
  misc_feature (2)..(511): NCBI GI NO: 18447763 NR Description: putative serine carboxypeptidase precursor
  misc_feature (6)..(511): NCBI GI NO: 21901929 NR Description: carboxypeptidase type III [Theobroma cacao]
  misc_feature (34)..(505): NCBI GI NO: 584893 NR Description: Serine carboxypeptidase III precursor
  misc_feature (12)..(515): NCBI GI NO: 2851577 NR Description: Serine carboxypeptidase III precursor (CP-MIII)
  misc_feature (34)..(505): NCBI GI NO: 82620 NR Description: carboxypeptidase C (EC 3.4.16.5) precursor - wheat
  misc_feature (34)..(505): NCBI GI NO: 115874 NR Description: Serine carboxypeptidase III precursor (CP-WIII)
  misc_feature (1)..(505): NCBI GI NO: 6960455 NR Description: serine carboxypeptidase precursor
  misc_feature (96)..(503): NCBI GI NO: 100571 NR Description: carboxypeptidase C (EC 3.4.16.5) - barley
MRPADQLLLPFLLLAVASVAAAGGSWENGYGSILRLPSSSPRRFPRSAAVDLIHALNLHPADASPPLSTAGVEGALAPAGTLVERPIRIASFANGGAATSVEDLGHHAGYYRLANTHDARMFYFFFESRGHKDDPVVIWLTGGPGCSSELALFYENGPFNIADNLSLVWNDFGWDKASNLIYVDQPTGTGFSYSSDSRDTRHNEATISNDLYDFLQAFFAEHPKYAKNDFFITGESYAGHYIPAFASRVHQGNKNNEGIHINLKGFAIGNGLTDPAIQYKAYPDYALDMGLITKTQFNRINKIVPTCEFAVKLCGTSGTVSCLAAYFVCNTIFSAIRTIIGNKNYYDIRKPCIGSLCYDFSNLEKFLNLKSVRESLGVGDIEFVSCSPTVYEAMLLDWMRNLEVGIPELLESDIKVLIYAGEYDLICNWLGNSRWVNSMEWSGKEAFVSSSEKPFTVDGKEAGVLKSHGPLSFLKVHDAGHMVPMDQPKAALEMLKRWTSGNLSEPSSSSQRLDFTM

SEQ ID NO: 41677 - protein, 397 aa, Zea mays subsp. mays
  peptide (1)..(397): Ceres Seq. ID no. 12384308
  misc_feature (1)..(397): NCBI GI NO: 34901686 NR Description: carboxypeptidase C cbp31
  misc_feature (1)..(397): NCBI GI NO: 1705667 NR Description: Serine carboxypeptidase-like precursor
  misc_feature (1)..(391): NCBI GI NO: 18447763 NR Description: putative serine carboxypeptidase precursor
  misc_feature (1)..(391): NCBI GI NO: 21901929 NR Description: carboxypeptidase type III [Theobroma cacao]
  misc_feature (1)..(385): NCBI GI NO: 584893 NR Description: Serine carboxypeptidase III precursor
  misc_feature (1)..(395): NCBI GI NO: 2851577 NR Description: Serine carboxypeptidase III precursor (CP-MIII)
  misc_feature (1)..(385): NCBI GI NO: 82620 NR Description: carboxypeptidase C (EC 3.4.16.5) precursor - wheat
  misc_feature (1)..(385): NCBI GI NO: 115874 NR Description: Serine carboxypeptidase III precursor (CP-WIII)
  misc_feature (1)..(385): NCBI GI NO: 6960455 NR Description: serine carboxypeptidase precursor
  misc_feature (1)..(383): NCBI GI NO: 100571 NR Description: carboxypeptidase C (EC 3.4.16.5) - barley
MFYFFFESRGHKDDPVVIWLTGGPGCSSELALFYENGPFNIADNLSLVWNDFGWDKASNLIYVDQPTGTGFSYSSDSRDTRHNEATISNDLYDFLQAFFAEHPKYAKNDFFITGESYAGHYIPAFASRVHQGNKNNEGIHINLKGFAIGNGLTDPAIQYKAYPDYALDMGLITKTQFNRINKIVPTCEFAVKLCGTSGTVSCLAAYFVCNTIFSAIRTIIGNKNYYDIRKPCIGSLCYDFSNLEKFLNLKSVRESLGVGDIEFVSCSPTVYEAMLLDWMRNLEVGIPELLESDIKVLIYAGEYDLICNWLGNSRWVNSMEWSGKEAFVSSSEKPFTVDGKEAGVLKSHGPLSFLKVHDAGHMVPMDQPKAALEMLKRWTSGNLSEPSSSSQRLDFTM

SEQ ID NO: 41678 - DNA, 864 bp, Zea mays subsp. mays
  misc_feature (1)..(864): Ceres Seq. ID no. 12418353
acctctgttcagccaaagccacctccccaaacccaatcccgtcactatctcattcccctgaccgccggaacaccctaggcaatggagcccaaatccaccacccctcccccgccccccgtgatgggcgcgcccatcgcgtatcctcccccgcccggcgccgcgtaccccgccgggccgtacgtgcacgcgccggcggccgcgctctaccctcctcctcccctgccgccggcgcccccctcctcgcagcagggcgccgcggcggcgcaccagcagcagctattctgggcggagcaataccgcgagatcgaggccaccaccgacttcaagaaccacaacctgccgctcgcccgcatcaagaagatcatgaaggccgacgaggacgtgcgcatgatcgccgccgaggcgcccgtcgtcttctcccgcgcctgcgagatgttcatcctcgagctcacccaccgcggctgggcacacgccgaggagaacaagcgccgcacgctgcagaagtccgacatcgccgccgccgtcgcgcgcaccgaggtcttcgacttcctcgtcgacatcgtgccgcgggacgaggccaaggacgccgactccgccgccatgggagcagccgggatcccgcaccccgccgccggcctgcccgccgccgatcccatgggctactactacgtccagccgcagtaacgaatttgcttccttatcatggtttcgcttccatgcagcctttgcgggtttttagtaaactattattattactgagagtgccctgttgttacccatgctctgttgttgccacccaataactcgatgacctgatgatcatctgatgtgcctcccgttccgtaacaagtgattccatttctg

SEQ ID NO: 41679 - protein, 266 aa, Zea mays subsp. mays
  peptide (1)..(266): Ceres Seq. ID no. 12418354
  misc_feature (10)..(224): Pfam Name: Pfam Description:  HlyD family secretion protein
LCSAKATSPNPIPSLSHSPDRRNTLGNGAQIHHPSPAPRDGRAHRVSSPARRRVPRRAVRARAGGRALPSSSPAAGAPLLAAGRRGGAPAAAILGGAIPRDRGHHRLQEPQPAARPHQEDHEGRRGRAHDRRRGARRLLPRLRDVHPRAHPPRLGTRRGEQAPHAAEVRHRRRRRAHRGLRLPRRHRAAGRGQGRRLRRHGSSRDPAPRRRPARRRSHGLLLRPAAVTNLLPYHGFASMQPLRVFSKLLLLLRVPCCYPCSVVATQ

SEQ ID NO: 41680 - protein, 200 aa, Zea mays subsp. mays
  peptide (1)..(200): Ceres Seq. ID no. 12418355
  misc_feature (1)..(200): NCBI GI NO: 5257260 NR Description: Similar to sequence of BAC F7G19 from Arabidopsisthaliana
  misc_feature (22)..(193): NCBI GI NO: 15242784 NR Description: transcription factor Hap5a-like protein
  misc_feature (37)..(193): NCBI GI NO: 15228405 NR Description: transcription factor Hap5a; protein id:At3g48590
  misc_feature (55)..(194): NCBI GI NO: 15223986 NR Description: putative transcription factor
  misc_feature (55)..(194): NCBI GI NO: 25372763 NR Description: hypothetical protein
  misc_feature (20)..(200): NCBI GI NO: 15223482 NR Description: transcription factor, putative
  misc_feature (55)..(194): NCBI GI NO: 6289057 NR Description: heme activated protein [Arabidopsis thaliana]
  misc_feature (28)..(187): NCBI GI NO: 15221912 NR Description: heme activated protein, putative
  misc_feature (20)..(200): NCBI GI NO: 21554704 NR Description: transcription factor, putative
  misc_feature (73)..(200): NCBI GI NO: 2398533 NR Description: Transcription factor [Arabidopsis thaliana]
MEPKSTTPPPPPVMGAPIAYPPPPGAAYPAGPYVHAPAAALYPPPPLPPAPPSSQQGAAAAHQQQLFWAEQYREIEATTDFKNHNLPLARIKKIMKADEDVRMIAAEAPVVFSRACEMFILELTHRGWAHAEENKRRTLQKSDIAAAVARTEVFDFLVDIVPRDEAKDADSAAMGAAGIPHPAAGLPAADPMGYYYVQPQ

SEQ ID NO: 41681 - protein, 187 aa, Zea mays subsp. mays
  peptide (1)..(187): Ceres Seq. ID no. 12418356
  misc_feature (1)..(187): NCBI GI NO: 5257260 NR Description: Similar to sequence of BAC F7G19 from Arabidopsisthaliana
  misc_feature (9)..(180): NCBI GI NO: 15242784 NR Description: transcription factor Hap5a-like protein
  misc_feature (24)..(180): NCBI GI NO: 15228405 NR Description: transcription factor Hap5a; protein id:At3g48590
  misc_feature (42)..(181): NCBI GI NO: 15223986 NR Description: putative transcription factor
  misc_feature (42)..(181): NCBI GI NO: 25372763 NR Description: hypothetical protein
  misc_feature (7)..(187): NCBI GI NO: 15223482 NR Description: transcription factor, putative
  misc_feature (42)..(181): NCBI GI NO: 6289057 NR Description: heme activated protein [Arabidopsis thaliana]
  misc_feature (15)..(174): NCBI GI NO: 15221912 NR Description: heme activated protein, putative
  misc_feature (7)..(187): NCBI GI NO: 21554704 NR Description: transcription factor, putative
  misc_feature (60)..(187): NCBI GI NO: 2398533 NR Description: Transcription factor [Arabidopsis thaliana]
MGAPIAYPPPPGAAYPAGPYVHAPAAALYPPPPLPPAPPSSQQGAAAAHQQQLFWAEQYREIEATTDFKNHNLPLARIKKIMKADEDVRMIAAEAPVVFSRACEMFILELTHRGWAHAEENKRRTLQKSDIAAAVARTEVFDFLVDIVPRDEAKDADSAAMGAAGIPHPAAGLPAADPMGYYYVQPQ

SEQ ID NO: 41682 - DNA, 400 bp, Zea mays subsp. mays
  misc_feature (1)..(400): Ceres Seq. ID no. 2731917
gacctcgccgccttcatcgccgactgcatatacgaccaggacaaggccaacaaggtgctgcccattggcgggccggggaaggcgctcacgccgctggagcagggggagatgctgtttcggctgctcgggcgcgagcccaagttcatcaaggtgcccatacagatcatggacgccgttatctgggtgctcgatggattggccaagctgttcccggggttggaggacgccgccgagttcggcaagattggcaggtactatgcctcggagagcatgctgttgctggacccggagaccggggagtacagcgacgagaagacgcccagctacggcaaggacacgctcgagcagttcttccaaagagtgataagggaagggatggcggggcargagcttggcgagc

SEQ ID NO: 41683 - protein, 133 aa, Zea mays subsp. mays
  peptide (1)..(133): Ceres Seq. ID no. 2731918
  misc_feature (1)..(132): NCBI GI NO: 15239530 NR Description: putative protein; protein id: At5g18660
  misc_feature (1)..(132): NCBI GI NO: 26449404 NR Description: unknown protein [Arabidopsis thaliana]
  misc_feature (1)..(132): NCBI GI NO: 21553818 NR Description: unknown [Arabidopsis thaliana]
  misc_feature (1)..(132): NCBI GI NO: 33865497 NR Description: conserved hypothetical protein
  misc_feature (1)..(132): NCBI GI NO: 21673889 NR Description: conserved hypothetical protein
  misc_feature (1)..(132): NCBI GI NO: 22959007 NR Description: hypothetical protein [Rhodobacter sphaeroides]
  misc_feature (1)..(127): NCBI GI NO: 21328662 NR Description: conserved hypothetical protein
  misc_feature (129)..(129): Xaa is any aa, unknown or other
DLAAFIADCIYDQDKANKVLPIGGPGKALTPLEQGEMLFRLLGREPKFIKVPIQIMDAVIWVLDGLAKLFPGLEDAAEFGKIGRYYASESMLLLDPETGEYSDEKTPSYGKDTLEQFFQRVIREGMAGXELGE

SEQ ID NO: 41684 - protein, 132 aa, Zea mays subsp. mays
  peptide (1)..(132): Ceres Seq. ID no. 2731919
  misc_feature (129)..(129): Xaa is any aa, unknown or other
PRRLHRRLHIRPGQGQQGAAHWRAGEGAHAAGAGGDAVSAARARAQVHQGAHTDHGRRYLGARWIGQAVPGVGGRRRVRQDWQVLCLGEHAVAGPGDRGVQRREDAQLRQGHARAVLPKSDKGRDGGAXAWR

SEQ ID NO: 41685 - protein, 120 aa, Zea mays subsp. mays
  peptide (1)..(120): Ceres Seq. ID no. 2731920
TSPPSSPTAYTTRTRPTRCCPLAGRGRRSRRWSRGRCCFGCSGASPSSSRCPYRSWTPLSGCSMDWPSCSRGWRTPPSSARLAGTMPRRACCCWTRRPGSTATRRRPATARTRSSSSSKE

SEQ ID NO: 41686 - DNA, 1828 bp, Zea mays subsp. mays
  misc_feature (1)..(1828): Ceres Seq. ID no. 13495214
gcacgagaccattacctagaacatcctaatcgaaaaaaaccggagcggcggcaccatttcgttaccatggagaacctggcagggcagcagttcgtttatgaggtgacgagtctacgagcattgtttctgctgctcctcctccctcccttcatcttcctcatcatgcgcaacgcgcgagcaacaacactaatgttcgataccaagaggacaaggggccaccggcagcctgcagatcggcagcagagcctcccgccgtcgcctccggcagtgcctgtcctcggccacctgcacctcgtcggctctctcccgcacgtctccctccgcagcctcgccaggacgcttggcgcggacctcatgctgctccgcctgggctccacgccggtgctggtcgtgtcgtcgtccagcgccgccgaggccgtgctgcgcacgcacgaccacgtgttcgcgtcgcggccgcacgccctggtctccgaggtcgtcctgtacggtccgtccgacgtcgggttcgcgccgcacggcgactgctggcggcccggggcggaagctcatcaccacgcaccttctcagcgtcaacagggtgcagtcgttccgccacgcccgggaagaagaggtgagcgtggtgatgggccggatcgccgaggcggcggccgctggtgcggcggtggacgtgggcgagctgctcggctcgttcacgaacgacctagcgtgccgcgccgtgatgggcaagtccttccggagcgagggtcgcaacaagctgttccgggagcttgtcctcgacaccaccaagctgctggtcggcttcaacgtcgaggacttcttccccttcctggctcgcttcggcgtgctcagcaagctggtccgcgccaagtccgagagactgaggaggaggtgggacgagctactcgataggctgatcgaggatcgtgagagcaagtatgaggcggcggcggcgagtgatctcaaggtcaaggacgatgatgacgataacttcatacatgtcttgctctccgttcaacaggagtacggccatattaccagggagcaaatgaaagctctcctgcaggacgtgtttatcggggggatagactccacatcttcgctgctcgagttcaccatggctgagctcatgcggaaaccacgagtgatgaacaagctccaagccgaggtaaggagcagcacgcccgaggggcatgatggagtcgtcggcgaagatagcctggagcacatggcctacctgagggccgtgacaaaagagtccctccggatccataacgtgacgccgctcctggccccgcacctgtccatggatagctgcaccatcgatggctacacggtccccgccggggtgcaggtcctgatcaactcttgggccatcggcagggacacgcgctactggggcgacgacgctgaggagttcgtccctgagaggttcatggacggcggcagcgccgttcatgtcagcttcaaggggagtgacttcgagttcctgccattcgggtctggacgaaggatgtgcgccggggtgaacttcgcgatggccacggtagagctaatgttggcgaacctcgtgcatcgttttgactgggatttaccaccggggcaggagggtcgcgacattgatgtgtcgcaggtgttcggactagtagtccgccggaaaaagaaacttctcttggttccaaaattacgtgtatactagcatccccctccccgcacccaagatatactgggctgttgcatatatgtatgtactgcaataaaggttgcctatatgtaagcttacgacattacttgtactgggtatatgatgcaataatgttattagaaattt

SEQ ID NO: 41687 - protein, 357 aa, Zea mays subsp. mays
  peptide (1)..(357): Ceres Seq. ID no. 13495215
  misc_feature (1)..(351): Pfam Name: Pfam Description:  Cytochrome P450
  misc_feature (1)..(352): NCBI GI NO: 19909892 NR Description: P450 [Triticum aestivum]
  misc_feature (1)..(352): NCBI GI NO: 19909894 NR Description: P450 [Triticum aestivum]
  misc_feature (1)..(353): NCBI GI NO: 5921189 NR Description: Cytochrome P450 71C4
  misc_feature (1)..(354): NCBI GI NO: 5921187 NR Description: Cytochrome P450 71C2
  misc_feature (1)..(354): NCBI GI NO: 19909886 NR Description: P450 [Triticum aestivum]
  misc_feature (1)..(354): NCBI GI NO: 7430630 NR Description: cytochrome P450 - maize
  misc_feature (1)..(354): NCBI GI NO: 5921186 NR Description: Cytochrome P450 71C1
  misc_feature (1)..(354): NCBI GI NO: 26655531 NR Description: cytochrome P450 [Triticum aestivum]
  misc_feature (1)..(354): NCBI GI NO: 19909888 NR Description: P450 [Triticum aestivum]
  misc_feature (1)..(357): NCBI GI NO: 7430631 NR Description: cytochrome P450 - maize (fragment)
MGRIAEAAAAGAAVDVGELLGSFTNDLACRAVMGKSFRSEGRNKLFRELVLDTTKLLVGFNVEDFFPFLARFGVLSKLVRAKSERLRRRWDELLDRLIEDRESKYEAAAASDLKVKDDDDDNFIHVLLSVQQEYGHITREQMKALLQDVFIGGIDSTSSLLEFTMAELMRKPRVMNKLQAEVRSSTPEGHDGVVGEDSLEHMAYLRAVTKESLRIHNVTPLLAPHLSMDSCTIDGYTVPAGVQVLINSWAIGRDTRYWGDDAEEFVPERFMDGGSAVHVSFKGSDFEFLPFGSGRRMCAGVNFAMATVELMLANLVHRFDWDLPPGQEGRDIDVSQVFGLVVRRKKKLLLVPKLRVY

SEQ ID NO: 41688 - protein, 325 aa, Zea mays subsp. mays
  peptide (1)..(325): Ceres Seq. ID no. 13495216
  misc_feature (1)..(319): Pfam Name: Pfam Description:  Cytochrome P450
  misc_feature (1)..(320): NCBI GI NO: 19909892 NR Description: P450 [Triticum aestivum]
  misc_feature (1)..(320): NCBI GI NO: 19909894 NR Description: P450 [Triticum aestivum]
  misc_feature (1)..(321): NCBI GI NO: 5921189 NR Description: Cytochrome P450 71C4
  misc_feature (1)..(322): NCBI GI NO: 5921187 NR Description: Cytochrome P450 71C2
  misc_feature (1)..(322): NCBI GI NO: 19909886 NR Description: P450 [Triticum aestivum]
  misc_feature (1)..(322): NCBI GI NO: 7430630 NR Description: cytochrome P450 - maize
  misc_feature (1)..(322): NCBI GI NO: 5921186 NR Description: Cytochrome P450 71C1
  misc_feature (1)..(322): NCBI GI NO: 26655531 NR Description: cytochrome P450 [Triticum aestivum]
  misc_feature (1)..(322): NCBI GI NO: 19909888 NR Description: P450 [Triticum aestivum]
  misc_feature (1)..(325): NCBI GI NO: 7430631 NR Description: cytochrome P450 - maize (fragment)
MGKSFRSEGRNKLFRELVLDTTKLLVGFNVEDFFPFLARFGVLSKLVRAKSERLRRRWDELLDRLIEDRESKYEAAAASDLKVKDDDDDNFIHVLLSVQQEYGHITREQMKALLQDVFIGGIDSTSSLLEFTMAELMRKPRVMNKLQAEVRSSTPEGHDGVVGEDSLEHMAYLRAVTKESLRIHNVTPLLAPHLSMDSCTIDGYTVPAGVQVLINSWAIGRDTRYWGDDAEEFVPERFMDGGSAVHVSFKGSDFEFLPFGSGRRMCAGVNFAMATVELMLANLVHRFDWDLPPGQEGRDIDVSQVFGLVVRRKKKLLLVPKLRVY

SEQ ID NO: 41689 - protein, 302 aa, Zea mays subsp. mays
  peptide (1)..(302): Ceres Seq. ID no. 13495217
  misc_feature (85)..(177): Pfam Name: Pfam Description:  Cytochrome P450
  misc_feature (82)..(177): NCBI GI NO: 19909892 NR Description: P450 [Triticum aestivum]
  misc_feature (82)..(177): NCBI GI NO: 19909894 NR Description: P450 [Triticum aestivum]
  misc_feature (42)..(177): NCBI GI NO: 5921189 NR Description: Cytochrome P450 71C4
  misc_feature (45)..(179): NCBI GI NO: 5921187 NR Description: Cytochrome P450 71C2
  misc_feature (29)..(177): NCBI GI NO: 19909886 NR Description: P450 [Triticum aestivum]
  misc_feature (69)..(177): NCBI GI NO: 7430630 NR Description: cytochrome P450 - maize
  misc_feature (69)..(177): NCBI GI NO: 5921186 NR Description: Cytochrome P450 71C1
  misc_feature (36)..(177): NCBI GI NO: 26655531 NR Description: cytochrome P450 [Triticum aestivum]
  misc_feature (45)..(177): NCBI GI NO: 19909888 NR Description: P450 [Triticum aestivum]
  misc_feature (36)..(177): NCBI GI NO: 7430631 NR Description: cytochrome P450 - maize (fragment)
ARDHYLEHPNRKKPERRHHFVTMENLAGQQFVYEVTSLRALFLLLLLPPFIFLIMRNARATTLMFDTKRTRGHRQPADRQQSLPPSPPAVPVLGHLHLVGSLPHVSLRSLARTLGADLMLLRLGSTPVLVVSSSSAAEAVLRTHDHVFASRPHALVSEVVLYGPSDVGFAPHGDCWRPGAEAHHHAPSQRQQGAVVPPRPGRRGERGDGPDRRGGGRWCGGGRGRAARLVHERPSVPRRDGQVLPERGSQQAVPGACPRHHQAAGRLQRRGLLPLPGSLRRAQQAGPRQVRETEEEVGRATR

SEQ ID NO: 41690 - DNA, 508 bp, Zea mays subsp. mays
  misc_feature (1)..(508): Ceres Seq. ID no. 12378052
  misc_feature (502)..(502): n is a, c, t, g, unknown, or other
  misc_feature (501)..(501): n is a, c, t, g, unknown, or other
atcgtttctgctttgcaagtcaatcaaactgagccagtgaagaagtttgagcccagatctaaactgtggtctgatactttgagccgaggtctagtcaatctggacatttctggaccaaaagcgaatcctcatgctgatattggagttgactttgattcaatcaatcgcaaggagaaaaggcaggaaaagaaaatcaaccaagcacctgtggtgtctacagtcaccatgggcaaggccatgggagctggttccggcattggtcgggctggtgtaggtgcaatggcacctcctcctaaccaaatgggtgccgggaggggtatgggtcctggtgccggtgccggttatggtggtggaatgggaatgaaccggccaatgggcatggggatgggaatgaatcaacaacagatgaggatggggatgaaccaacaaccgatgggaatggggatggggatgaaccaacaaccgatgggaggaatgaacatggggatggggatgaaccannggatgc

SEQ ID NO: 41691 - protein, 169 aa, Zea mays subsp. mays
  peptide (1)..(169): Ceres Seq. ID no. 12378053
  misc_feature (100)..(165): Pfam Name: Pfam Description:  Bindin
  misc_feature (1)..(168): NCBI GI NO: 15451572 NR Description: Putative epsin [Oryza sativa]
  misc_feature (12)..(164): NCBI GI NO: 25408842 NR Description: hypothetical protein At2g43170
  misc_feature (12)..(164): NCBI GI NO: 15215854 NR Description: At2g43170/F14B2.11 [Arabidopsis thaliana]
  misc_feature (12)..(164): NCBI GI NO: 30689266 NR Description: clathrin binding protein (epsin) -related
  misc_feature (14)..(164): NCBI GI NO: 11357285 NR Description: epsin-like protein - Arabidopsis thaliana
  misc_feature (14)..(164): NCBI GI NO: 18411135 NR Description: epsin-like protein; protein id: At3g59290
  misc_feature (65)..(166): NCBI GI NO: 15451572 NR Description: Putative epsin [Oryza sativa]
  misc_feature (76)..(168): NCBI GI NO: 10954050 NR Description: ovarian fibroin-like substance-2 [Cyprinus carpio]
  misc_feature (76)..(168): NCBI GI NO: 10954050 NR Description: ovarian fibroin-like substance-2 [Cyprinus carpio]
  misc_feature (77)..(165): NCBI GI NO: 10954050 NR Description: ovarian fibroin-like substance-2 [Cyprinus carpio]
  misc_feature (167)..(167): Xaa is any aa, unknown or other
  misc_feature (168)..(168): Xaa is any aa, unknown or other
IVSALQVNQTEPVKKFEPRSKLWSDTLSRGLVNLDISGPKANPHADIGVDFDSINRKEKRQEKKINQAPVVSTVTMGKAMGAGSGIGRAGVGAMAPPPNQMGAGRGMGPGAGAGYGGGMGMNRPMGMGMGMNQQQMRMGMNQQPMGMGMGMNQQPMGGMNMGMGMNXXM

SEQ ID NO: 41692 - protein, 94 aa, Zea mays subsp. mays
  peptide (1)..(94): Ceres Seq. ID no. 12378054
  misc_feature (25)..(90): Pfam Name: Pfam Description:  Bindin
  misc_feature (1)..(93): NCBI GI NO: 15451572 NR Description: Putative epsin [Oryza sativa]
  misc_feature (1)..(89): NCBI GI NO: 25408842 NR Description: hypothetical protein At2g43170
  misc_feature (1)..(89): NCBI GI NO: 15215854 NR Description: At2g43170/F14B2.11 [Arabidopsis thaliana]
  misc_feature (1)..(89): NCBI GI NO: 30689266 NR Description: clathrin binding protein (epsin) -related
  misc_feature (1)..(89): NCBI GI NO: 11357285 NR Description: epsin-like protein - Arabidopsis thaliana
  misc_feature (1)..(89): NCBI GI NO: 18411135 NR Description: epsin-like protein; protein id: At3g59290
  misc_feature (1)..(91): NCBI GI NO: 15451572 NR Description: Putative epsin [Oryza sativa]
  misc_feature (1)..(93): NCBI GI NO: 10954050 NR Description: ovarian fibroin-like substance-2 [Cyprinus carpio]
  misc_feature (1)..(93): NCBI GI NO: 10954050 NR Description: ovarian fibroin-like substance-2 [Cyprinus carpio]
  misc_feature (2)..(90): NCBI GI NO: 10954050 NR Description: ovarian fibroin-like substance-2 [Cyprinus carpio]
  misc_feature (92)..(92): Xaa is any aa, unknown or other
  misc_feature (93)..(93): Xaa is any aa, unknown or other
MGKAMGAGSGIGRAGVGAMAPPPNQMGAGRGMGPGAGAGYGGGMGMNRPMGMGMGMNQQQMRMGMNQQPMGMGMGMNQQPMGGMNMGMGMNXXM

SEQ ID NO: 41693 - protein, 90 aa, Zea mays subsp. mays
  peptide (1)..(90): Ceres Seq. ID no. 12378055
  misc_feature (21)..(86): Pfam Name: Pfam Description:  Bindin
  misc_feature (1)..(89): NCBI GI NO: 15451572 NR Description: Putative epsin [Oryza sativa]
  misc_feature (1)..(85): NCBI GI NO: 25408842 NR Description: hypothetical protein At2g43170
  misc_feature (1)..(85): NCBI GI NO: 15215854 NR Description: At2g43170/F14B2.11 [Arabidopsis thaliana]
  misc_feature (1)..(85): NCBI GI NO: 30689266 NR Description: clathrin binding protein (epsin) -related
  misc_feature (1)..(85): NCBI GI NO: 11357285 NR Description: epsin-like protein - Arabidopsis thaliana
  misc_feature (1)..(85): NCBI GI NO: 18411135 NR Description: epsin-like protein; protein id: At3g59290
  misc_feature (1)..(87): NCBI GI NO: 15451572 NR Description: Putative epsin [Oryza sativa]
  misc_feature (1)..(89): NCBI GI NO: 10954050 NR Description: ovarian fibroin-like substance-2 [Cyprinus carpio]
  misc_feature (1)..(89): NCBI GI NO: 10954050 NR Description: ovarian fibroin-like substance-2 [Cyprinus carpio]
  misc_feature (1)..(86): NCBI GI NO: 10954050 NR Description: ovarian fibroin-like substance-2 [Cyprinus carpio]
  misc_feature (88)..(88): Xaa is any aa, unknown or other
  misc_feature (89)..(89): Xaa is any aa, unknown or other
MGAGSGIGRAGVGAMAPPPNQMGAGRGMGPGAGAGYGGGMGMNRPMGMGMGMNQQQMRMGMNQQPMGMGMGMNQQPMGGMNMGMGMNXXM

SEQ ID NO: 41694 - DNA, 433 bp, Zea mays subsp. mays
  misc_feature (1)..(433): Ceres Seq. ID no. 13635227
gcttcactcgcgtccgccccgccgccgcctttcgtcccagcccctaaaccattctccattcctctcatcagtttagcacaatggcactggctaataagcttggtggtctgctcaagaaagccacaagttcaaatctgtctgtctaccaagcaatcagatgcatgtcatccaagctctttgttggagggatttcttatcaaactgatgatcacagtctcagggacgagtttgccaaatatgggcaagtcattgaagctaggattatcattgaccgtgaatctgggaggtctagaggttttggctttgtaacttacacgtcttctgaggaggcttcagctgccattactgccttggatggaaagactctcgatggacggagcatacgtgttaatcatgctaacgagaagacaggtggctttcgtggcggcggtgg

SEQ ID NO: 41695 - protein, 117 aa, Zea mays subsp. mays
  peptide (1)..(117): Ceres Seq. ID no. 13635228
  misc_feature (32)..(103): Pfam Name: a.k.a. RRM, RBD, or RNP domain Pfam Description: RNA recognition motif.
  misc_feature (1)..(116): NCBI GI NO: 15239505 NR Description: RNA-binding protein, putative
  misc_feature (1)..(116): NCBI GI NO: 1084415 NR Description: RNA-binding protein - wood tobacco
  misc_feature (1)..(116): NCBI GI NO: 15822703 NR Description: RNA-binding protein precursor [Nicotiana tabacum]
  misc_feature (1)..(116): NCBI GI NO: 7439995 NR Description: RNA binding protein 3 - wood tobacco
  misc_feature (1)..(116): NCBI GI NO: 15822705 NR Description: RNA-binding protein precursor [Solanum tuberosum]
  misc_feature (1)..(116): NCBI GI NO: 7439994 NR Description: glycine-rich RNA-binding protein - garden pea
  misc_feature (1)..(116): NCBI GI NO: 15221187 NR Description: glycine-rich RNA-binding protein
  misc_feature (1)..(115): NCBI GI NO: 7489099 NR Description: RNA-binding protein RGP-3 - wood tobacco
  misc_feature (1)..(95): NCBI GI NO: 19881711 NR Description: Putative RNA-binding protein [Oryza sativa]
  misc_feature (1)..(116): NCBI GI NO: 2826811 NR Description: AtGRP2 [Arabidopsis thaliana]
MALANKLGGLLKKATSSNLSVYQAIRCMSSKLFVGGISYQTDDHSLRDEFAKYGQVIEARIIIDRESGRSRGFGFVTYTSSEEASAAITALDGKTLDGRSIRVNHANEKTGGFRGGG

SEQ ID NO: 41696 - protein, 102 aa, Zea mays subsp. mays
  peptide (1)..(102): Ceres Seq. ID no. 13635229
ASLASAPPPPFVPAPKPFSIPLISLAQWHWLISLVVCSRKPQVQICLSTKQSDACHPSSLLEGFLIKLMITVSGTSLPNMGKSLKLGLSLTVNLGGLEVLAL

SEQ ID NO: 41697 - protein, 90 aa, Zea mays subsp. mays
  peptide (1)..(90): Ceres Seq. ID no. 13635230
  misc_feature (5)..(76): Pfam Name: a.k.a. RRM, RBD, or RNP domain Pfam Description: RNA recognition motif.
  misc_feature (1)..(89): NCBI GI NO: 15239505 NR Description: RNA-binding protein, putative
  misc_feature (1)..(89): NCBI GI NO: 1084415 NR Description: RNA-binding protein - wood tobacco
  misc_feature (1)..(89): NCBI GI NO: 15822703 NR Description: RNA-binding protein precursor [Nicotiana tabacum]
  misc_feature (1)..(89): NCBI GI NO: 7439995 NR Description: RNA binding protein 3 - wood tobacco
  misc_feature (1)..(89): NCBI GI NO: 15822705 NR Description: RNA-binding protein precursor [Solanum tuberosum]
  misc_feature (1)..(89): NCBI GI NO: 7439994 NR Description: glycine-rich RNA-binding protein - garden pea
  misc_feature (1)..(89): NCBI GI NO: 15221187 NR Description: glycine-rich RNA-binding protein
  misc_feature (1)..(88): NCBI GI NO: 7489099 NR Description: RNA-binding protein RGP-3 - wood tobacco
  misc_feature (1)..(68): NCBI GI NO: 19881711 NR Description: Putative RNA-binding protein [Oryza sativa]
  misc_feature (1)..(89): NCBI GI NO: 2826811 NR Description: AtGRP2 [Arabidopsis thaliana]
MSSKLFVGGISYQTDDHSLRDEFAKYGQVIEARIIIDRESGRSRGFGFVTYTSSEEASAAITALDGKTLDGRSIRVNHANEKTGGFRGGG

SEQ ID NO: 41698 - DNA, 1919 bp, Zea mays subsp. mays
  misc_feature (1)..(1919): Ceres Seq. ID no. 13493088
atgtacacattgcccgtccgtgccaccacatccagcatcgtcgccagcctcgccacccccgcgccgtcctcctcctccggctccggccgccccaggctcaggctcatccggaacgcccccgtcttcgccgcccccgccaccgtctgtaaacgggacggcgggcagctgaggagtcaaacgagagagatcgagagagaaagaaagggagggcatccaccagccggcgggcataagaggggaggagagagaggccagagaagaggaggagaagaagaagaagatgagcagctgcctctgccttccgaaaaaaaaggaggggccagcgaaggagaagccgtccacagatacccccacctcgtcactccttcagaaccagaagccctccaacctccacctcctccctccaaggcttcctccaagggcatggaccccaccgtcgagcgcttgaagagcgggttccagaagttcaagaccgaggtctatgacaagaagccggagctgttcgagcctctcaagtccggccagagccccaggtacatggtgttcgcctgctccgactcccgcgtgtgcccgtcggtgacactgggactgcagcccggcgaggcattcaccgtccgcaacatcgcttccatggtcccaccctacgacaagatcaagtacgccggcacagggtccgccatcgagtacgccgtgtgcgcgctcaaggtgcaggtcatcgtggtcattggccacagctgctgcggtggcatcagggcgctcctctccctcaaggacggcgcgcccgacaacttcaccttcgtggaggactgggtcaggatcggcagccctgccaagaacaaggtgaagaaagagcacgcgtccgtgccgttcgatgaccagtgctccatcctggagaaggaggccgtgaacgtgtcgctccagaacctcaagagctaccccttcgtcaaggaagggctggccggcgggacgctcaagctggttggcgcccactcacacttcgtcaaagggcagttcgtcacatgggagcctccccaggacgccatcgagcgcttgacgagcggcttccagcagttcaaggtcaatgtctatgacaagaagccggagcttttcgggcctctcaagtccggccaggcccccaagtacatggtgttcgcctgctccgactcccgtgtgtgcccgtcggtgaccctgggcctgcagccgggcgaggccttcaccgttcgcaacatcgccgccatggtcccaggctacgacaagaccaagtacaccggcatcgggtccgccatcgagtacgctgtgtgcgccctcaaggtggaggtcctcgtggtcattggccatagctgctgcggtggcatcagggcgctcctctcactccaggacggcgcagcctacaccttccacttcgtcgaggactgggttaagatcggcttcattgccaagatgaaggtaaagaaagagcacgcctcggtgccgttcgatgaccagtgctccattctcgagaaggaggccgtgaacgtgtccctggagaacctcaagacctaccccttcgtcaaggaagggcttgcaaatgggaccctcaagctgatcggcgcccactacgactttgtctcaggagagttcctcacatggaaaaagtgaaaaactagggctaaggcaattctaccggcccgccgactctgcatcatcataatatatatactataactatactactagctacctaccgatagtcacccgagcaatgtgaatgcgtcgagtactatctgttttctgcatctacatatatataccggatcaacaatcgcccaatgtgaatgtaataagcaatatcattttctaccacttttcattcctaacgctgaggctttttatgtactatatcttatatgatgaataataatatgaccgccttgtgatct

SEQ ID NO: 41699 - protein, 545 aa, Zea mays subsp. mays
  peptide (1)..(545): Ceres Seq. ID no. 13493089
  misc_feature (1)..(545): NCBI GI NO: 7489809 NR Description: probable carbonate dehydratase (EC 4
  misc_feature (137)..(544): NCBI GI NO: 7489810 NR Description: probable carbonate dehydratase (EC 4
  misc_feature (146)..(545): NCBI GI NO: 7489810 NR Description: probable carbonate dehydratase (EC 4
  misc_feature (98)..(343): NCBI GI NO: 7436816 NR Description: probable carbonate dehydratase (EC 4
  misc_feature (118)..(343): NCBI GI NO: 34911604 NR Description: carbonic anhydrase
  misc_feature (340)..(545): NCBI GI NO: 882246 NR Description: carbonic anhydrase 2
  misc_feature (142)..(342): NCBI GI NO: 729003 NR Description: CARBONIC ANHYDRASE, CHLOROPLAST PRECURSOR
  misc_feature (346)..(545): NCBI GI NO: 882248 NR Description: carbonic anhydrase 1
  misc_feature (347)..(545): NCBI GI NO: 729003 NR Description: CARBONIC ANHYDRASE, CHLOROPLAST PRECURSOR
  misc_feature (140)..(342): NCBI GI NO: 882248 NR Description: carbonic anhydrase 1
MYTLPVRATTSSIVASLATPAPSSSSGSGRPRLRLIRNAPVFAAPATVCKRDGGQLRSQTREIERERKGGHPPAGGHKRGGERGQRRGGEEEEDEQLPLPSEKKGGASEGEAVHRYPHLVTPSEPEALQPPPPPSKASSKGMDPTVERLKSGFQKFKTEVYDKKPELFEPLKSGQSPRYMVFACSDSRVCPSVTLGLQPGEAFTVRNIASMVPPYDKIKYAGTGSAIEYAVCALKVQVIVVIGHSCCGGIRALLSLKDGAPDNFTFVEDWVRIGSPAKNKVKKEHASVPFDDQCSILEKEAVNVSLQNLKSYPFVKEGLAGGTLKLVGAHSHFVKGQFVTWEPPQDAIERLTSGFQQFKVNVYDKKPELFGPLKSGQAPKYMVFACSDSRVCPSVTLGLQPGEAFTVRNIAAMVPGYDKTKYTGIGSAIEYAVCALKVEVLVVIGHSCCGGIRALLSLQDGAAYTFHFVEDWVKIGFIAKMKVKKEHASVPFDDQCSILEKEAVNVSLENLKTYPFVKEGLANGTLKLIGAHYDFVSGEFLTWKK

SEQ ID NO: 41700 - protein, 404 aa, Zea mays subsp. mays
  peptide (1)..(404): Ceres Seq. ID no. 13493090
  misc_feature (1)..(404): NCBI GI NO: 7489809 NR Description: probable carbonate dehydratase (EC 4
  misc_feature (1)..(403): NCBI GI NO: 7489810 NR Description: probable carbonate dehydratase (EC 4
  misc_feature (5)..(404): NCBI GI NO: 7489810 NR Description: probable carbonate dehydratase (EC 4
  misc_feature (1)..(202): NCBI GI NO: 7436816 NR Description: probable carbonate dehydratase (EC 4
  misc_feature (1)..(202): NCBI GI NO: 34911604 NR Description: carbonic anhydrase
  misc_feature (199)..(404): NCBI GI NO: 882246 NR Description: carbonic anhydrase 2
  misc_feature (1)..(201): NCBI GI NO: 729003 NR Description: CARBONIC ANHYDRASE, CHLOROPLAST PRECURSOR
  misc_feature (205)..(404): NCBI GI NO: 882248 NR Description: carbonic anhydrase 1
  misc_feature (206)..(404): NCBI GI NO: 729003 NR Description: CARBONIC ANHYDRASE, CHLOROPLAST PRECURSOR
  misc_feature (1)..(201): NCBI GI NO: 882248 NR Description: carbonic anhydrase 1
MDPTVERLKSGFQKFKTEVYDKKPELFEPLKSGQSPRYMVFACSDSRVCPSVTLGLQPGEAFTVRNIASMVPPYDKIKYAGTGSAIEYAVCALKVQVIVVIGHSCCGGIRALLSLKDGAPDNFTFVEDWVRIGSPAKNKVKKEHASVPFDDQCSILEKEAVNVSLQNLKSYPFVKEGLAGGTLKLVGAHSHFVKGQFVTWEPPQDAIERLTSGFQQFKVNVYDKKPELFGPLKSGQAPKYMVFACSDSRVCPSVTLGLQPGEAFTVRNIAAMVPGYDKTKYTGIGSAIEYAVCALKVEVLVVIGHSCCGGIRALLSLQDGAAYTFHFVEDWVKIGFIAKMKVKKEHASVPFDDQCSILEKEAVNVSLENLKTYPFVKEGLANGTLKLIGAHYDFVSGEFLTWKK

SEQ ID NO: 41701 - protein, 366 aa, Zea mays subsp. mays
  peptide (1)..(366): Ceres Seq. ID no. 13493091
  misc_feature (1)..(366): NCBI GI NO: 7489809 NR Description: probable carbonate dehydratase (EC 4
  misc_feature (1)..(365): NCBI GI NO: 7489810 NR Description: probable carbonate dehydratase (EC 4
  misc_feature (1)..(366): NCBI GI NO: 7489810 NR Description: probable carbonate dehydratase (EC 4
  misc_feature (1)..(164): NCBI GI NO: 7436816 NR Description: probable carbonate dehydratase (EC 4
  misc_feature (1)..(164): NCBI GI NO: 34911604 NR Description: carbonic anhydrase
  misc_feature (161)..(366): NCBI GI NO: 882246 NR Description: carbonic anhydrase 2
  misc_feature (1)..(163): NCBI GI NO: 729003 NR Description: CARBONIC ANHYDRASE, CHLOROPLAST PRECURSOR
  misc_feature (167)..(366): NCBI GI NO: 882248 NR Description: carbonic anhydrase 1
  misc_feature (168)..(366): NCBI GI NO: 729003 NR Description: CARBONIC ANHYDRASE, CHLOROPLAST PRECURSOR
  misc_feature (1)..(163): NCBI GI NO: 882248 NR Description: carbonic anhydrase 1
MVFACSDSRVCPSVTLGLQPGEAFTVRNIASMVPPYDKIKYAGTGSAIEYAVCALKVQVIVVIGHSCCGGIRALLSLKDGAPDNFTFVEDWVRIGSPAKNKVKKEHASVPFDDQCSILEKEAVNVSLQNLKSYPFVKEGLAGGTLKLVGAHSHFVKGQFVTWEPPQDAIERLTSGFQQFKVNVYDKKPELFGPLKSGQAPKYMVFACSDSRVCPSVTLGLQPGEAFTVRNIAAMVPGYDKTKYTGIGSAIEYAVCALKVEVLVVIGHSCCGGIRALLSLQDGAAYTFHFVEDWVKIGFIAKMKVKKEHASVPFDDQCSILEKEAVNVSLENLKTYPFVKEGLANGTLKLIGAHYDFVSGEFLTWKK

SEQ ID NO: 41702 - DNA, 724 bp, Zea mays subsp. mays
  misc_feature (1)..(724): Ceres Seq. ID no. 12378048
  misc_feature (523)..(523): n is a, c, t, g, unknown, or other
ccccagctgccggctgttcggtgcccagagatcgccgcacgatctcctcggcggcggcgccgttgcggatgtggtgctgtggaggaagaaggaggtggccaccgggacgctggcggccgtggtggcctcatgggcgctcttctactgcgtgcccggctacactctgctctccttcctggcccaggtgctcatgatcctgctcaccgtcctcttcgtctgggccaaggctgcgcagctgctcaacagggcacctccgcctatcccattgatgaaaatttctgacgagtcaatgagtgaagcagcagaaatggttggtagcttcatcaacaaggtgctcaaggatttcgaaaacattgcacttgggaaggataacagcctcttctacaaggtggcttttgtgctgttgctggcctccatagttggacgactgaccgatcttatcactttagtatatacaagtgctattattgctctcacggtccctgcattgctggagaaatccgaagaacacattgccagattnttcaagaaaacttcgatatatgttcaggcatttggcagagcatgcaaagagtataaatgtaagatgacgaatatgatatcggaaacgaagaaactgcgttgatgtcaatgtgttttcactagcaaattttgacttgtgagattgcttcttcggaagcgaaatagttgtgacttttggcatcaatcacaatcgtgatcttac

SEQ ID NO: 41703 - protein, 207 aa, Zea mays subsp. mays
  peptide (1)..(207): Ceres Seq. ID no. 12378049
  misc_feature (2)..(171): NCBI GI NO: 15232423 NR Description: putative protein; protein id: At3g54120.1
  misc_feature (8)..(171): NCBI GI NO: 38345298 NR Description: OSJNBa0043A12.26
  misc_feature (26)..(156): NCBI GI NO: 38344513 NR Description: OSJNBa0016N04.6
  misc_feature (11)..(187): NCBI GI NO: 18402246 NR Description: expressed protein; protein id: At3g19460
  misc_feature (11)..(187): NCBI GI NO: 21593206 NR Description: unknown [Arabidopsis thaliana]
  misc_feature (4)..(171): NCBI GI NO: 15238125 NR Description: putative protein; protein id: At5g41600
  misc_feature (4)..(171): NCBI GI NO: 34899590 NR Description: hypothetical protein~similar to Oryza sativachromosome3
  misc_feature (4)..(171): NCBI GI NO: 34904202 NR Description: P0492F05.25
  misc_feature (4)..(194): NCBI GI NO: 34909318 NR Description: OSJNBb0021A09.5
  misc_feature (4)..(171): NCBI GI NO: 18406991 NR Description: expressed protein; protein id: At2g46170
  misc_feature (174)..(174): Xaa is any aa, unknown or other
PSCRLFGAQRSPHDLLGGGAVADVVLWRKKEVATGTLAAVVASWALFYCVPGYTLLSFLAQVLMILLTVLFVWAKAAQLLNRAPPPIPLMKISDESMSEAAEMVGSFINKVLKDFENIALGKDNSLFYKVAFVLLLASIVGRLTDLITLVYTSAIIALTVPALLEKSEEHIARXFKKTSIYVQAFGRACKEYKCKMTNMISETKKLR

SEQ ID NO: 41704 - protein, 144 aa, Zea mays subsp. mays
  peptide (1)..(144): Ceres Seq. ID no. 12378050
  misc_feature (1)..(108): NCBI GI NO: 15232423 NR Description: putative protein; protein id: At3g54120.1
  misc_feature (1)..(108): NCBI GI NO: 38345298 NR Description: OSJNBa0043A12.26
  misc_feature (1)..(93): NCBI GI NO: 38344513 NR Description: OSJNBa0016N04.6
  misc_feature (1)..(124): NCBI GI NO: 18402246 NR Description: expressed protein; protein id: At3g19460
  misc_feature (1)..(124): NCBI GI NO: 21593206 NR Description: unknown [Arabidopsis thaliana]
  misc_feature (1)..(108): NCBI GI NO: 15238125 NR Description: putative protein; protein id: At5g41600
  misc_feature (1)..(108): NCBI GI NO: 34899590 NR Description: hypothetical protein~similar to Oryza sativachromosome3
  misc_feature (1)..(108): NCBI GI NO: 34904202 NR Description: P0492F05.25
  misc_feature (1)..(131): NCBI GI NO: 34909318 NR Description: OSJNBb0021A09.5
  misc_feature (1)..(108): NCBI GI NO: 18406991 NR Description: expressed protein; protein id: At2g46170
  misc_feature (111)..(111): Xaa is any aa, unknown or other
MILLTVLFVWAKAAQLLNRAPPPIPLMKISDESMSEAAEMVGSFINKVLKDFENIALGKDNSLFYKVAFVLLLASIVGRLTDLITLVYTSAIIALTVPALLEKSEEHIARXFKKTSIYVQAFGRACKEYKCKMTNMISETKKLR

SEQ ID NO: 41705 - protein, 118 aa, Zea mays subsp. mays
  peptide (1)..(118): Ceres Seq. ID no. 12378051
  misc_feature (1)..(82): NCBI GI NO: 15232423 NR Description: putative protein; protein id: At3g54120.1
  misc_feature (1)..(82): NCBI GI NO: 38345298 NR Description: OSJNBa0043A12.26
  misc_feature (1)..(67): NCBI GI NO: 38344513 NR Description: OSJNBa0016N04.6
  misc_feature (1)..(98): NCBI GI NO: 18402246 NR Description: expressed protein; protein id: At3g19460
  misc_feature (1)..(98): NCBI GI NO: 21593206 NR Description: unknown [Arabidopsis thaliana]
  misc_feature (1)..(82): NCBI GI NO: 15238125 NR Description: putative protein; protein id: At5g41600
  misc_feature (1)..(82): NCBI GI NO: 34899590 NR Description: hypothetical protein~similar to Oryza sativachromosome3
  misc_feature (1)..(82): NCBI GI NO: 34904202 NR Description: P0492F05.25
  misc_feature (1)..(105): NCBI GI NO: 34909318 NR Description: OSJNBb0021A09.5
  misc_feature (1)..(82): NCBI GI NO: 18406991 NR Description: expressed protein; protein id: At2g46170
  misc_feature (85)..(85): Xaa is any aa, unknown or other
MKISDESMSEAAEMVGSFINKVLKDFENIALGKDNSLFYKVAFVLLLASIVGRLTDLITLVYTSAIIALTVPALLEKSEEHIARXFKKTSIYVQAFGRACKEYKCKMTNMISETKKLR

SEQ ID NO: 41706 - DNA, 1453 bp, Zea mays subsp. mays
  misc_feature (1)..(1453): Ceres Seq. ID no. 12381732
gcacgagaccattacctagaacatcctaatcgaaaaattactgcacttgctctccggctccgggcagccacgagtatcagccccggcgagcggcggcgatgcagaacctgctgtccggcgcgtcccacgagacgctcccggacagcttcatcttcccggccgagcagcgcccgccggcgtcggcagccgccgtcgcgctccccgtcatcgacctgtccgggccccgcgacgaggtccggcgagccgttcttgaagctggcaaggagctaggcttcttccaggtggtgaaccacggcgtgccggagcaggtggtgcgggacatggaggcgtgctgcgaggagttcttccgcctccccgcggaggacaaggcggccttctactcggaggacacaagcaagcccaaccgcctcttcaccagcaccacctacggcaccggcggcgagcgctactggcgggactgcctccgcctggcctgcggcttccccgtcgccgccgacgccagggacgcctggcccgacaagcccgacggcctcagggaggcggcggagaggttcgtcgcgtcgacgaggcgcctgaacctggagctgctgcggctgctgtgcgagggcgtgggcctccgcgcggactacttcgagggggacctcagcgccggcgacgtggtcgtgaatgtcaaccactacccgccgtgcccggacccggcgcgcacgctgggcctgccgccgcactgcgaccgcaacctcatcacgctgctgctccagggcagcgtcgccggcctccaggtgtcctaccgcggcgactggatccgcgtccagcccgtgcccggcgccttcgtcgtcaactttggccaccagctcgagatcgccacgaacgggctgctgaagagcatcgagcaccgcgcggtggccagcgcggcggtgccgcgcacctcggtggcgacgttcatcatgcccaccgacgactgccttgtcgcccccgccgcggagctcgccggcggcggagacaagccgccgccgcggtaccgcgccgtcacgttccgggatttcatgaaggtgtacaagaccgtcggcgcgcgcagggagagcgtcgagaaggccttcaagatctgatggacgcgtatacatgctcgacatgcgttctgctcggcagagatctggtagttgttatctgcactgaataaaaggatgggagaaaaaacagaaaacgtcgcaagcagttcgcggcacaaactctctgtctctttcgttccaatttgcaactgtgtgtgtgagccgatgatagtgagtagagagcttcgttcccaactccggtgagtgccagaagagccaacaagtcctgcacgaacaccagtcgtcaccggagagcttcctgccggtgtcggcaaggatgcaaaggtgccaagagaatcgctttgtgtgtgaccttgtgccccgaaataaagggattgttcttgttt

SEQ ID NO: 41707 - protein, 335 aa, Zea mays subsp. mays
  peptide (1)..(335): Ceres Seq. ID no. 12381733
  misc_feature (185)..(284): Pfam Name: II Pfam Description: 2OG-Fe
  misc_feature (8)..(335): NCBI GI NO: 34395014 NR Description: putative iron deficiency protein Ids3
  misc_feature (1)..(322): NCBI GI NO: 9711238 NR Description: IDS3 [Hordeum vulgare subsp. vulgare]
  misc_feature (1)..(322): NCBI GI NO: 7433181 NR Description: iron deficiency protein Ids3 - barley
  misc_feature (1)..(322): NCBI GI NO: 4514655 NR Description: IDS3 [Hordeum vulgare subsp. vulgare]
  misc_feature (1)..(322): NCBI GI NO: 1076723 NR Description: dioxygenase, iron defiency-specific
  misc_feature (1)..(319): NCBI GI NO: 15238567 NR Description: flavanone 3-hydroxylase-like protein
  misc_feature (1)..(334): NCBI GI NO: 37536444 NR Description: unknown protein
  misc_feature (1)..(334): NCBI GI NO: 15235124 NR Description: putative flavanone 3-beta-hydroxylase
  misc_feature (1)..(319): NCBI GI NO: 21553527 NR Description: flavanone 3-hydroxylase-like protein
  misc_feature (1)..(334): NCBI GI NO: 38345872 NR Description: OSJNBa0064M23.14
MQNLLSGASHETLPDSFIFPAEQRPPASAAAVALPVIDLSGPRDEVRRAVLEAGKELGFFQVVNHGVPEQVVRDMEACCEEFFRLPAEDKAAFYSEDTSKPNRLFTSTTYGTGGERYWRDCLRLACGFPVAADARDAWPDKPDGLREAAERFVASTRRLNLELLRLLCEGVGLRADYFEGDLSAGDVVVNVNHYPPCPDPARTLGLPPHCDRNLITLLLQGSVAGLQVSYRGDWIRVQPVPGAFVVNFGHQLEIATNGLLKSIEHRAVASAAVPRTSVATFIMPTDDCLVAPAAELAGGGDKPPPRYRAVTFRDFMKVYKTVGARRESVEKAFKI

SEQ ID NO: 41708 - protein, 261 aa, Zea mays subsp. mays
  peptide (1)..(261): Ceres Seq. ID no. 12381734
  misc_feature (111)..(210): Pfam Name: II Pfam Description: 2OG-Fe
  misc_feature (1)..(261): NCBI GI NO: 34395014 NR Description: putative iron deficiency protein Ids3
  misc_feature (1)..(248): NCBI GI NO: 9711238 NR Description: IDS3 [Hordeum vulgare subsp. vulgare]
  misc_feature (1)..(248): NCBI GI NO: 7433181 NR Description: iron deficiency protein Ids3 - barley
  misc_feature (1)..(248): NCBI GI NO: 4514655 NR Description: IDS3 [Hordeum vulgare subsp. vulgare]
  misc_feature (1)..(248): NCBI GI NO: 1076723 NR Description: dioxygenase, iron defiency-specific
  misc_feature (1)..(245): NCBI GI NO: 15238567 NR Description: flavanone 3-hydroxylase-like protein
  misc_feature (1)..(260): NCBI GI NO: 37536444 NR Description: unknown protein
  misc_feature (1)..(260): NCBI GI NO: 15235124 NR Description: putative flavanone 3-beta-hydroxylase
  misc_feature (1)..(245): NCBI GI NO: 21553527 NR Description: flavanone 3-hydroxylase-like protein
  misc_feature (1)..(260): NCBI GI NO: 38345872 NR Description: OSJNBa0064M23.14
MEACCEEFFRLPAEDKAAFYSEDTSKPNRLFTSTTYGTGGERYWRDCLRLACGFPVAADARDAWPDKPDGLREAAERFVASTRRLNLELLRLLCEGVGLRADYFEGDLSAGDVVVNVNHYPPCPDPARTLGLPPHCDRNLITLLLQGSVAGLQVSYRGDWIRVQPVPGAFVVNFGHQLEIATNGLLKSIEHRAVASAAVPRTSVATFIMPTDDCLVAPAAELAGGGDKPPPRYRAVTFRDFMKVYKTVGARRESVEKAFKI

SEQ ID NO: 41709 - DNA, 1093 bp, Zea mays subsp. mays
  misc_feature (1)..(1093): Ceres Seq. ID no. 12383116
aaaactaggaatgagttcgctcgctaaaattggccggatgtgagcgctcccgttcgttcctctctcgcaaaatcaaccgccttccacggctcctccatctcgtcgccactgtgagaagctccatcgtcgtgcatcaactcagcaagattttgaggagagaagaacaagaattttgcagcaagactttgacagaagcaaaatacttcacgctattggagagctacgaaaagagtttatgagaccaccatctacatcaactctagctaaaattgcagggaatccaagatgggatccttactttaagtgttgtattggtgcaataaatggcacacatgtgcaagcatatgttcctaaacacatggaggcttcctttcacggtagaaagagttatgctactcaaaatgtcatggcagcagtatattttaatcttcgattcacatttgtcttggtcggttgggaggagacaactcatgatgcactagtcttacatgatgctttagaaagagaaaatggtattcgtgtgcctgaaggcaagttctacctagtcgatgccggatatggagccaaacttggatttatgccccttttcgtggtgtacaataccacttgaacgagcggggaaataatccagtgcaaaatgagaaaaaattattcaatcataggcattcatctctaagagtttcagtagagtgagcatttggttcattgaaaagaagatttaaaattcttgatgatgctacaccgttcttccccttctctacacaagtagaaattgtggttgcttgttgtattattcacaattgggttatacaagatggacgtgatgactttatcattcctgagaatgaggaattgcctaccattaatcatcacgtatcttcgcatggacaagcaatagagcatgatattatgattaactttaggcaggaacttgccaatgctatgtgggaagactatcatgcaaacactatttgattgctatgtattttccaatgtctctatcatttgtatggacatgtagaatttatttgtatggacatgtatcttttatttgtatggacatgtgtattttattcgtatggacatatatctt

SEQ ID NO: 41710 - protein, 124 aa, Zea mays subsp. mays
  peptide (1)..(124): Ceres Seq. ID no. 12383117
  misc_feature (1)..(118): NCBI GI NO: 38345857 NR Description: OSJNBa0084K11.21
  misc_feature (1)..(118): NCBI GI NO: 38569160 NR Description: OSJNBa0042N22.14
  misc_feature (25)..(118): NCBI GI NO: 37530780 NR Description: putative transposase
  misc_feature (25)..(118): NCBI GI NO: 40786599 NR Description: expressed protein
  misc_feature (1)..(118): NCBI GI NO: 38345208 NR Description: OSJNBb0012E08.4
  misc_feature (25)..(118): NCBI GI NO: 34911316 NR Description: P0519D04.27
  misc_feature (1)..(118): NCBI GI NO: 21397269 NR Description: Unknown protein
  misc_feature (1)..(118): NCBI GI NO: 15230463 NR Description: putative protein; protein id: At3g44640.1
  misc_feature (1)..(115): NCBI GI NO: 34915332 NR Description: transposase-like
  misc_feature (1)..(115): NCBI GI NO: 37530994 NR Description: putative transposase
MRPPSTSTLAKIAGNPRWDPYFKCCIGAINGTHVQAYVPKHMEASFHGRKSYATQNVMAAVYFNLRFTFVLVGWEETTHDALVLHDALERENGIRVPEGKFYLVDAGYGAKLGFMPLFVVYNTT

SEQ ID NO: 41711 - protein, 83 aa, Zea mays subsp. mays
  peptide (1)..(83): Ceres Seq. ID no. 12383118
  misc_feature (1)..(77): NCBI GI NO: 38345857 NR Description: OSJNBa0084K11.21
  misc_feature (1)..(77): NCBI GI NO: 38569160 NR Description: OSJNBa0042N22.14
  misc_feature (1)..(77): NCBI GI NO: 37530780 NR Description: putative transposase
  misc_feature (1)..(77): NCBI GI NO: 40786599 NR Description: expressed protein
  misc_feature (1)..(77): NCBI GI NO: 38345208 NR Description: OSJNBb0012E08.4
  misc_feature (1)..(77): NCBI GI NO: 34911316 NR Description: P0519D04.27
  misc_feature (1)..(77): NCBI GI NO: 21397269 NR Description: Unknown protein
  misc_feature (1)..(77): NCBI GI NO: 15230463 NR Description: putative protein; protein id: At3g44640.1
  misc_feature (1)..(74): NCBI GI NO: 34915332 NR Description: transposase-like
  misc_feature (1)..(74): NCBI GI NO: 37530994 NR Description: putative transposase
MEASFHGRKSYATQNVMAAVYFNLRFTFVLVGWEETTHDALVLHDALERENGIRVPEGKFYLVDAGYGAKLGFMPLFVVYNTT

SEQ ID NO: 41712 - protein, 67 aa, Zea mays subsp. mays
  peptide (1)..(67): Ceres Seq. ID no. 12383119
  misc_feature (1)..(61): NCBI GI NO: 38345857 NR Description: OSJNBa0084K11.21
  misc_feature (1)..(61): NCBI GI NO: 38569160 NR Description: OSJNBa0042N22.14
  misc_feature (1)..(61): NCBI GI NO: 37530780 NR Description: putative transposase
  misc_feature (1)..(61): NCBI GI NO: 40786599 NR Description: expressed protein
  misc_feature (1)..(61): NCBI GI NO: 38345208 NR Description: OSJNBb0012E08.4
  misc_feature (1)..(61): NCBI GI NO: 34911316 NR Description: P0519D04.27
  misc_feature (1)..(61): NCBI GI NO: 21397269 NR Description: Unknown protein
  misc_feature (1)..(61): NCBI GI NO: 15230463 NR Description: putative protein; protein id: At3g44640.1
  misc_feature (1)..(58): NCBI GI NO: 34915332 NR Description: transposase-like
  misc_feature (1)..(58): NCBI GI NO: 37530994 NR Description: putative transposase
MAAVYFNLRFTFVLVGWEETTHDALVLHDALERENGIRVPEGKFYLVDAGYGAKLGFMPLFVVYNTT

SEQ ID NO: 41713 - DNA, 1513 bp, Zea mays subsp. mays
  misc_feature (1)..(1513): Ceres Seq. ID no. 13580212
aggatgaatcggaagagagaatcctaccaaacctagctaccaactcgatcgtcgtcatcacgctcgaccgcacaactgcaccaaggggggaggagacctaaaaactactacatcttttagctacacatctagctaaagatcgagaggggtaaataaggacgagcgggcgcgagctagaagagcagctgcaggtactaccatcatcgtcgtcgtcgtcgccaggatgaccgtcgtcgacgccgtcgtctcctccaccgatgccggcgcccctgctgccgccgccaccgcggtaccggcggggaacgggcagaccgtgtgcgtgaccggcgcggccgggtacatcgcctcgtggttggtgaagctgctgctcgagaagggatacactgtgaagggcaccgtcaggaacccagatgacccgaagaacgcgcacctcaaggcgctggacggcgccgccgagcggctgatcctctgcaaggccgatctgctggactacgacgccatctgccgcgccgtgcagggctgccagggcgtcttccacaccgcctcccccgtcaccgacgacccggagcaaatggtggagccggcggtgcgcggcaccgagtacgtgatcaacgcggcggcggaggccggcacggtgcggcgggtggtgttcacgtcgtccatcggcgccgtgaccatggaccccaagcgcgggcccgacgtcgtggtcgacgagtcgtgctggagcgacctcgagttctgcgagaaaaccaggaactggtactgctacggcaaggcggtggcggagcacgcggcgtgggagacggcccggcggcggggcgtggacctggtggtggtgaaccccgtgctggtggtgggccccctgctgcaggcgacggtgaacgccagcatcgcgcacatcctcaagtacctggacggctcggcccgcaccttcgccaacgccgtgcaggcgtacgtggacgtgcgcgacgtggccgacgcgcacctccgcgtcttcgagagcccccgcgcgtccggccgccacctctgcgccgagcgcgtcctccaccgcgaggacgtcgtccgcatcctcgccaagctcttccccgagtaccccgtcccagccaggtgctccgacgaggtgaatccgcggaagcagccgtacaagttctccaaccagaagctccgggacctggggctgcagttccggccggtcagccagtcgctttacgacacggtgaagaacctccaggagaagggacacctgccggtgctcggagagcggacgacgacggaggccgccgacaaggatgcccccacggccgagatgcagcagggagggatcgccatccgtgcctgagagggcgatgccacacatgaacacaaagcaatgttcatactgctgccctgcacctgctgtgtaaacaggcctgtgtttgttctggctgatagtgatgtaccctaagacttgtaacgtcatgttcgttcttgtgaactatagcgagtgaataaaattggttaatgttggatgttc

SEQ ID NO: 41714 - protein, 371 aa, Zea mays subsp. mays
  peptide (1)..(371): Ceres Seq. ID no. 13580213
  misc_feature (31)..(146): Pfam Name: Pfam Description:  NAD dependent epimerase/dehydratase family
  misc_feature (1)..(371): NCBI GI NO: 7431410 NR Description: cinnamoyl CoA reductase - maize
  misc_feature (1)..(371): NCBI GI NO: 3242328 NR Description: cinnamoyl-CoA reductase [Zea mays]
  misc_feature (1)..(371): NCBI GI NO: 3341511 NR Description: cinnamoyl-CoA reductase [Saccharum officinarum]
  misc_feature (1)..(371): NCBI GI NO: 17978549 NR Description: cinnamoyl-CoA reductase [Lolium perenne]
  misc_feature (11)..(360): NCBI GI NO: 25140432 NR Description: cinnamoyl CoA reductase [Hordeum vulgare]
  misc_feature (20)..(343): NCBI GI NO: 9964087 NR Description: cinnamoyl CoA reductase [Lolium perenne]
  misc_feature (25)..(343): NCBI GI NO: 9998901 NR Description: cinnamoyl-CoA reductase
  misc_feature (25)..(343): NCBI GI NO: 2960364 NR Description: cinnamoyl CoA reductase
  misc_feature (22)..(343): NCBI GI NO: 7431407 NR Description: cinnamoyl-CoA reductase (EC 1
  misc_feature (22)..(343): NCBI GI NO: 25989515 NR Description: cinnamoyl CoA reductase [Eucalyptus globulus]
MTVVDAVVSSTDAGAPAAAATAVPAGNGQTVCVTGAAGYIASWLVKLLLEKGYTVKGTVRNPDDPKNAHLKALDGAAERLILCKADLLDYDAICRAVQGCQGVFHTASPVTDDPEQMVEPAVRGTEYVINAAAEAGTVRRVVFTSSIGAVTMDPKRGPDVVVDESCWSDLEFCEKTRNWYCYGKAVAEHAAWETARRRGVDLVVVNPVLVVGPLLQATVNASIAHILKYLDGSARTFANAVQAYVDVRDVADAHLRVFESPRASGRHLCAERVLHREDVVRILAKLFPEYPVPARCSDEVNPRKQPYKFSNQKLRDLGLQFRPVSQSLYDTVKNLQEKGHLPVLGERTTTEAADKDAPTAEMQQGGIAIRA

SEQ ID NO: 41715 - protein, 255 aa, Zea mays subsp. mays
  peptide (1)..(255): Ceres Seq. ID no. 13580214
  misc_feature (1)..(143): Pfam Name: Pfam Description:  3-beta hydroxysteroid dehydrogenase/ isomerase family
  misc_feature (1)..(255): NCBI GI NO: 7431410 NR Description: cinnamoyl CoA reductase - maize
  misc_feature (1)..(255): NCBI GI NO: 3242328 NR Description: cinnamoyl-CoA reductase [Zea mays]
  misc_feature (1)..(255): NCBI GI NO: 3341511 NR Description: cinnamoyl-CoA reductase [Saccharum officinarum]
  misc_feature (1)..(255): NCBI GI NO: 17978549 NR Description: cinnamoyl-CoA reductase [Lolium perenne]
  misc_feature (1)..(244): NCBI GI NO: 25140432 NR Description: cinnamoyl CoA reductase [Hordeum vulgare]
  misc_feature (1)..(227): NCBI GI NO: 9964087 NR Description: cinnamoyl CoA reductase [Lolium perenne]
  misc_feature (1)..(227): NCBI GI NO: 9998901 NR Description: cinnamoyl-CoA reductase
  misc_feature (1)..(227): NCBI GI NO: 2960364 NR Description: cinnamoyl CoA reductase
  misc_feature (1)..(227): NCBI GI NO: 7431407 NR Description: cinnamoyl-CoA reductase (EC 1
  misc_feature (1)..(227): NCBI GI NO: 25989515 NR Description: cinnamoyl CoA reductase [Eucalyptus globulus]
MVEPAVRGTEYVINAAAEAGTVRRVVFTSSIGAVTMDPKRGPDVVVDESCWSDLEFCEKTRNWYCYGKAVAEHAAWETARRRGVDLVVVNPVLVVGPLLQATVNASIAHILKYLDGSARTFANAVQAYVDVRDVADAHLRVFESPRASGRHLCAERVLHREDVVRILAKLFPEYPVPARCSDEVNPRKQPYKFSNQKLRDLGLQFRPVSQSLYDTVKNLQEKGHLPVLGERTTTEAADKDAPTAEMQQGGIAIRA

SEQ ID NO: 41716 - protein, 220 aa, Zea mays subsp. mays
  peptide (1)..(220): Ceres Seq. ID no. 13580215
  misc_feature (1)..(108): Pfam Name: Pfam Description:  3-beta hydroxysteroid dehydrogenase/ isomerase family
  misc_feature (1)..(220): NCBI GI NO: 7431410 NR Description: cinnamoyl CoA reductase - maize
  misc_feature (1)..(220): NCBI GI NO: 3242328 NR Description: cinnamoyl-CoA reductase [Zea mays]
  misc_feature (1)..(220): NCBI GI NO: 3341511 NR Description: cinnamoyl-CoA reductase [Saccharum officinarum]
  misc_feature (1)..(220): NCBI GI NO: 17978549 NR Description: cinnamoyl-CoA reductase [Lolium perenne]
  misc_feature (1)..(209): NCBI GI NO: 25140432 NR Description: cinnamoyl CoA reductase [Hordeum vulgare]
  misc_feature (1)..(192): NCBI GI NO: 9964087 NR Description: cinnamoyl CoA reductase [Lolium perenne]
  misc_feature (1)..(192): NCBI GI NO: 9998901 NR Description: cinnamoyl-CoA reductase
  misc_feature (1)..(192): NCBI GI NO: 2960364 NR Description: cinnamoyl CoA reductase
  misc_feature (1)..(192): NCBI GI NO: 7431407 NR Description: cinnamoyl-CoA reductase (EC 1
  misc_feature (1)..(192): NCBI GI NO: 25989515 NR Description: cinnamoyl CoA reductase [Eucalyptus globulus]
MDPKRGPDVVVDESCWSDLEFCEKTRNWYCYGKAVAEHAAWETARRRGVDLVVVNPVLVVGPLLQATVNASIAHILKYLDGSARTFANAVQAYVDVRDVADAHLRVFESPRASGRHLCAERVLHREDVVRILAKLFPEYPVPARCSDEVNPRKQPYKFSNQKLRDLGLQFRPVSQSLYDTVKNLQEKGHLPVLGERTTTEAADKDAPTAEMQQGGIAIRA

SEQ ID NO: 41717 - DNA, 1294 bp, Zea mays subsp. mays; identical to SEQ ID NO: 37648
  misc_feature (1)..(1294): Ceres Seq. ID no. 13494804

SEQ ID NO: 41718 - protein, 431 aa, Zea mays subsp. mays; identical to SEQ ID NO: 37649
  peptide (1)..(431): Ceres Seq. ID no. 13494805
  misc_feature (254)..(430): Pfam Name: Pfam Description:  Peptidase M16 inactive domain
  misc_feature (25)..(430): NCBI GI NO: 34909352 NR Description: putative mitochondrial processing peptidase alphasubuunit
  misc_feature (24)..(428): NCBI GI NO: 2117355 NR Description: mitochondrial processing peptidase (EC 3
  misc_feature (24)..(430): NCBI GI NO: 266567 NR Description: Mitochondrial processing peptidase alpha subunit
  misc_feature (24)..(430): NCBI GI NO: 18401141 NR Description: mitochondrial processing peptidase alpha subunit -related
  misc_feature (24)..(430): NCBI GI NO: 14334534 NR Description: putative mitochondrial processing peptidase alpha subunit
  misc_feature (24)..(430): NCBI GI NO: 15218090 NR Description: mitochondrial processing peptidase alpha subunit -related
  misc_feature (24)..(430): NCBI GI NO: 21594004 NR Description: mitochondrial processing peptidase alpha subunit
  misc_feature (40)..(430): NCBI GI NO: 34906418 NR Description: putative mitochondrial processing peptidase(EC:3
  misc_feature (24)..(430): NCBI GI NO: 11993905 NR Description: mitochondrial processing peptidase alpha-chainprecursor
  misc_feature (24)..(430): NCBI GI NO: 15076515 NR Description: mitochondrial processing peptidase alpha subunit

SEQ ID NO: 41719 - protein, 408 aa, Zea mays subsp. mays; identical to SEQ ID NO: 37650
  peptide (1)..(408): Ceres Seq. ID no. 13494806
  misc_feature (231)..(407): Pfam Name: Pfam Description:  Peptidase M16 inactive domain
  misc_feature (2)..(407): NCBI GI NO: 34909352 NR Description: putative mitochondrial processing peptidase alphasubuunit
  misc_feature (1)..(405): NCBI GI NO: 2117355 NR Description: mitochondrial processing peptidase (EC 3
  misc_feature (1)..(407): NCBI GI NO: 266567 NR Description: Mitochondrial processing peptidase alpha subunit
  misc_feature (1)..(407): NCBI GI NO: 18401141 NR Description: mitochondrial processing peptidase alpha subunit -related
  misc_feature (1)..(407): NCBI GI NO: 14334534 NR Description: putative mitochondrial processing peptidase alpha subunit
  misc_feature (1)..(407): NCBI GI NO: 15218090 NR Description: mitochondrial processing peptidase alpha subunit -related
  misc_feature (1)..(407): NCBI GI NO: 21594004 NR Description: mitochondrial processing peptidase alpha subunit
  misc_feature (17)..(407): NCBI GI NO: 34906418 NR Description: putative mitochondrial processing peptidase(EC:3
  misc_feature (1)..(407): NCBI GI NO: 11993905 NR Description: mitochondrial processing peptidase alpha-chainprecursor
  misc_feature (1)..(407): NCBI GI NO: 15076515 NR Description: mitochondrial processing peptidase alpha subunit

SEQ ID NO: 41720 - protein, 291 aa, Zea mays subsp. mays; identical to SEQ ID NO: 37651
  peptide (1)..(291): Ceres Seq. ID no. 13494807
  misc_feature (114)..(290): Pfam Name: Pfam Description:  Peptidase M16 inactive domain
  misc_feature (1)..(290): NCBI GI NO: 34909352 NR Description: putative mitochondrial processing peptidase alphasubuunit
  misc_feature (1)..(288): NCBI GI NO: 2117355 NR Description: mitochondrial processing peptidase (EC 3
  misc_feature (1)..(290): NCBI GI NO: 266567 NR Description: Mitochondrial processing peptidase alpha subunit
  misc_feature (1)..(290): NCBI GI NO: 18401141 NR Description: mitochondrial processing peptidase alpha subunit -related
  misc_feature (1)..(290): NCBI GI NO: 14334534 NR Description: putative mitochondrial processing peptidase alpha subunit
  misc_feature (1)..(290): NCBI GI NO: 15218090 NR Description: mitochondrial processing peptidase alpha subunit -related
  misc_feature (1)..(290): NCBI GI NO: 21594004 NR Description: mitochondrial processing peptidase alpha subunit
  misc_feature (1)..(290): NCBI GI NO: 34906418 NR Description: putative mitochondrial processing peptidase(EC:3
  misc_feature (1)..(290): NCBI GI NO: 11993905 NR Description: mitochondrial processing peptidase alpha-chainprecursor
  misc_feature (1)..(290): NCBI GI NO: 15076515 NR Description: mitochondrial processing peptidase alpha subunit

SEQ ID NO: 41721 - DNA, 981 bp, Zea mays subsp. mays
  misc_feature (1)..(981): Ceres Seq. ID no. 14305860
aaaaaatagccttatagccacatcccggccagccgcagcaagtgcccagaaggccagaaccagaaccaggtagcccgtgcaacctcatatcatcccctgccacgcacctccgtccgccgcgccatggaatcgaggaggagggccgtgcccaccgtgacggcggttgcggtggcgacgctgctgctgctgctgatgtcgtcgggcgtgggcggcgacttcgcggcggaccgggcggagtgctcggagcagctggcggggctggcgacgtgcctgacgtacgtgcaggagcaggcgacggcgacggcgccgacgcccgactgctgcgcgggcctgaaggcggtgctgcagagcagccgcaagtgcctgtgcgtgctggtcaaggaccgggacgaccccaacctaggcctcaagctcaacgtcgacaaggcgctcggcctccccgccgtctgccacgcgcccgccaacatctccgactgccccaggctgctggacctgccggccggctccaaggacgcgcaggtgttcgagcagtacgcgaagcagcaggcggcggcggcggcgcagggcggcggcgcacccaccagtggacgcagcagcgcggcggcgagcacgaccgcgggcgcgcagaagagcggagcctcagccgccggtcggtggttgggagtggggagggtcggtggtgctggtggcggcgcacgcgcggtggcgccgctcgccgtgcctttcctgctcctgctcgggtagataataataataactttacgcgcgcggccaacggccggagtcccggcggtttggttggcgccgcgcgttgccgacttgtgtgcttcgggtgcgtgcgtgtgtggtggggtacttttcacactatattggaaaaagaagctattatatatctttgactgaaaaaaagtgtcgttgtataattatctttttttcgtgtccgtgtatgcaacccctcctctcatagacccatagcgccaa

SEQ ID NO: 41722 - protein, 206 aa, Zea mays subsp. mays
  peptide (1)..(206): Ceres Seq. ID no. 14305861
  misc_feature (39)..(118): Pfam Name: Pfam Description:  Protease inhibitor/seed storage/LTP family
  misc_feature (1)..(203): NCBI GI NO: 34394084 NR Description: lipid transfer protein-like
  misc_feature (1)..(181): NCBI GI NO: 15224863 NR Description: lipid transfer protein - related
  misc_feature (1)..(181): NCBI GI NO: 15224862 NR Description: lipid transfer protein family
  misc_feature (12)..(181): NCBI GI NO: 18405294 NR Description: protease inhibitor/seed storage/lipid transfer
  misc_feature (24)..(181): NCBI GI NO: 21537387 NR Description: unknown [Arabidopsis thaliana]
  misc_feature (9)..(172): NCBI GI NO: 15231070 NR Description: protease inhibitor/seed storage/lipid transfer
  misc_feature (19)..(172): NCBI GI NO: 21555220 NR Description: unknown [Arabidopsis thaliana]
  misc_feature (14)..(173): NCBI GI NO: 15225509 NR Description: protease inhibitor/seed storage/lipid transfer
  misc_feature (14)..(173): NCBI GI NO: 27765012 NR Description: At2g13820 [Arabidopsis thaliana]
  misc_feature (34)..(118): NCBI GI NO: 18424785 NR Description: protease inhibitor/seed storage/lipid transfer
MESRRRAVPTVTAVAVATLLLLLMSSGVGGDFAADRAECSEQLAGLATCLTYVQEQATATAPTPDCCAGLKAVLQSSRKCLCVLVKDRDDPNLGLKLNVDKALGLPAVCHAPANISDCPRLLDLPAGSKDAQVFEQYAKQQAAAAAQGGGAPTSGRSSAAASTTAGAQKSGASAAGRWLGVGRVGGAGGGARAVAPLAVPFLLLLG

SEQ ID NO: 41723 - protein, 183 aa, Zea mays subsp. mays
  peptide (1)..(183): Ceres Seq. ID no. 14305862
  misc_feature (16)..(95): Pfam Name: Pfam Description:  Protease inhibitor/seed storage/LTP family
  misc_feature (1)..(180): NCBI GI NO: 34394084 NR Description: lipid transfer protein-like
  misc_feature (1)..(158): NCBI GI NO: 15224863 NR Description: lipid transfer protein - related
  misc_feature (1)..(158): NCBI GI NO: 15224862 NR Description: lipid transfer protein family
  misc_feature (1)..(158): NCBI GI NO: 18405294 NR Description: protease inhibitor/seed storage/lipid transfer
  misc_feature (1)..(158): NCBI GI NO: 21537387 NR Description: unknown [Arabidopsis thaliana]
  misc_feature (1)..(149): NCBI GI NO: 15231070 NR Description: protease inhibitor/seed storage/lipid transfer
  misc_feature (1)..(149): NCBI GI NO: 21555220 NR Description: unknown [Arabidopsis thaliana]
  misc_feature (1)..(150): NCBI GI NO: 15225509 NR Description: protease inhibitor/seed storage/lipid transfer
  misc_feature (1)..(150): NCBI GI NO: 27765012 NR Description: At2g13820 [Arabidopsis thaliana]
  misc_feature (11)..(95): NCBI GI NO: 18424785 NR Description: protease inhibitor/seed storage/lipid transfer
MSSGVGGDFAADRAECSEQLAGLATCLTYVQEQATATAPTPDCCAGLKAVLQSSRKCLCVLVKDRDDPNLGLKLNVDKALGLPAVCHAPANISDCPRLLDLPAGSKDAQVFEQYAKQQAAAAAQGGGAPTSGRSSAAASTTAGAQKSGASAAGRWLGVGRVGGAGGGARAVAPLAVPFLLLLG

SEQ ID NO: 41724 - DNA, 464 bp, Zea mays subsp. mays
  misc_feature (1)..(464): Ceres Seq. ID no. 12634242
agaaggcttcttcttgcgtaccttccacttccacccaacgcgactcgctctttcccgcatctggaagtcgccggctcagatccagccgggctgcggcgctggtcggatggccgagcagggcggcgcagccggggaggccgctggcagcgacccccctgcgcctgcgcctgcgactgccccggcgccagccccagcgcttgctgcggacgcggccgggcagaggtccctgccgacgccgttcctgaccaagacgtaccagctggtggacgacccggcggtggacgacgtgatctcgtggaacgaggacggctcgacgttcgtggtgtggcggccggcggagtttgcgcgcgacctcctccccaagtatttcaagcacaataacttctccagctttgtgcggcagctcaacacctacggatttaggaagatggtgcccgaccggtgggagtcgccaacgacttctt

SEQ ID NO: 41725 - protein, 154 aa, Zea mays subsp. mays
  peptide (1)..(154): Ceres Seq. ID no. 12634243
  misc_feature (78)..(149): Pfam Name: Pfam Description:  HSF-type DNA-binding
  misc_feature (24)..(149): NCBI GI NO: 33591098 NR Description: heat shock factor RHSF2
  misc_feature (40)..(149): NCBI GI NO: 15234264 NR Description: heat shock transcription factor - like protein
  misc_feature (73)..(149): NCBI GI NO: 6624618 NR Description: heat shock factor 7 [Arabidopsis thaliana]
  misc_feature (62)..(149): NCBI GI NO: 30697614 NR Description: heat shock transcription factor 6 (HSF6)
  misc_feature (66)..(149): NCBI GI NO: 15234583 NR Description: heat shock transcription factor HSF4
  misc_feature (72)..(149): NCBI GI NO: 15220101 NR Description: heat shock transcription factor, putative
  misc_feature (74)..(149): NCBI GI NO: 2129832 NR Description: heat shock transcription factor HSF5 - soybean
  misc_feature (66)..(149): NCBI GI NO: 2129612 NR Description: heat shock transcription factor HSF4
  misc_feature (73)..(149): NCBI GI NO: 123684 NR Description: HEAT SHOCK FACTOR PROTEIN HSF24
  misc_feature (73)..(149): NCBI GI NO: 5821136 NR Description: heat shock factor [Nicotiana tabacum]
EGFFLRTFHFHPTRLALSRIWKSPAQIQPGCGAGRMAEQGGAAGEAAGSDPPAPAPATAPAPAPALAADAAGQRSLPTPFLTKTYQLVDDPAVDDVISWNEDGSTFVVWRPAEFARDLLPKYFKHNNFSSFVRQLNTYGFRKMVPDRWESPTTS

SEQ ID NO: 41726 - protein, 126 aa, Zea mays subsp. mays
  peptide (1)..(126): Ceres Seq. ID no. 12634244
RRLLLAYLPLPPNATRSFPHLEVAGSDPAGLRRWSDGRAGRRSRGGRWQRPPCACACDCPGASPSACCGRGRAEVPADAVPDQDVPAGGRPGGGRRDLVERGRLDVRGVAAGGVCARPPPQVFQAQ

SEQ ID NO: 41727 - protein, 119 aa, Zea mays subsp. mays
  peptide (1)..(119): Ceres Seq. ID no. 12634245
  misc_feature (43)..(114): Pfam Name: Pfam Description:  HSF-type DNA-binding
  misc_feature (1)..(114): NCBI GI NO: 33591098 NR Description: heat shock factor RHSF2
  misc_feature (5)..(114): NCBI GI NO: 15234264 NR Description: heat shock transcription factor - like protein
  misc_feature (38)..(114): NCBI GI NO: 6624618 NR Description: heat shock factor 7 [Arabidopsis thaliana]
  misc_feature (27)..(114): NCBI GI NO: 30697614 NR Description: heat shock transcription factor 6 (HSF6)
  misc_feature (31)..(114): NCBI GI NO: 15234583 NR Description: heat shock transcription factor HSF4
  misc_feature (37)..(114): NCBI GI NO: 15220101 NR Description: heat shock transcription factor, putative
  misc_feature (39)..(114): NCBI GI NO: 2129832 NR Description: heat shock transcription factor HSF5 - soybean
  misc_feature (31)..(114): NCBI GI NO: 2129612 NR Description: heat shock transcription factor HSF4
  misc_feature (38)..(114): NCBI GI NO: 123684 NR Description: HEAT SHOCK FACTOR PROTEIN HSF24
  misc_feature (38)..(114): NCBI GI NO: 5821136 NR Description: heat shock factor [Nicotiana tabacum]
MAEQGGAAGEAAGSDPPAPAPATAPAPAPALAADAAGQRSLPTPFLTKTYQLVDDPAVDDVISWNEDGSTFVVWRPAEFARDLLPKYFKHNNFSSFVRQLNTYGFRKMVPDRWESPTTS

SEQ ID NO: 41728 - DNA, 1351 bp, Zea mays subsp. mays
  misc_feature (1)..(1351): Ceres Seq. ID no. 12418243
aacaaaaatcacgtttccatccatcctggcgcacaagaggaagcggagagctctctctctcccgcccgcaatataatggcgagagcacacctagccctggtcagcttcttcgctgcctcaattattggtgcggcgtccaagtcgttcaccatcgccaacaactgcgagcacacggtgtggccggggatcctctcgagcgccgggtccgcgggagtggacaccacaggcttcgcgctggcgccgggggagtcgcgcgctctgagcgtgcgtcggggtggtcgggccggctgtggggccgcacgctctgctccaccgacgcggccacgggccggttcgcctgcgtgaccggcgactgcggctcgggcaggcaggactgcggcggcggcggggccgccccgccggccacgcctggcagagttcaccatggacggcagcgggggcatggacttctacgacgtgagcctggtggacgggtacaacctgccgatgctggtggcgccgcagggcgcggccgctgccgcggggggcagctgcgtgcccaccggctgcatggcggacctcaacggcgcgtgccccgccgacctgcgcgtggcggcttcgacgacgtcctccggcggcggcggcgtggcctgcaagagcgcgtgcgaggcgttcgggtcggcgcagtactgctgcaacggcgactacgggaaccccagcacctgcaagccgtcggcgtactcgcagttcttcaagaacgcgtgcccccgggcgtacagctacgcctacgacgacgccacctccaccttcacctgcgccggcgacaccgcgtacgccatcaccttctgccccagcacgaccagcgtcaaggcggccggaggtagcccgcaggagcaaggagccctgccgctgatgaacgccaccatggtgtacctcggcggcgaccaggtcggatccgccacagccgcggcccggctgccgtccggcctcctccaccacgtcgtggtcctcgccgttgtgtccctcgcgctagcaggggctctgtactgatggtgatggcgaaccccactgcacagtgacgacgcgacgccacgcgggacaacagcccacgagacaatcgtgctcctctacagaccgaaggaaaaaaaattaaggatagaaacgagaaatggacgcatcacctgcctgccggtgtggacggcggtggtcctcgcggtccagcgagactgcgagccccgacgacggtgtgattattcacccgtgccgaccgagagagacgtgtgtagtggcgatacaaatttgattgaagacattattgtgcgttttcttagatatttattaattacacgataatacacacatgtattattat

SEQ ID NO: 41729 - protein, 286 aa, Zea mays subsp. mays
  peptide (1)..(286): Ceres Seq. ID no. 12418244
  misc_feature (82)..(132): NCBI GI NO: 7488208 NR Description: probable serine/threonine-specific protein kinase
  misc_feature (94)..(135): NCBI GI NO: 21553002 NR Description: osmotin-like protein 4 [Chenopodium quinoa]
QKSRFHPSWRTRGSGELSLSRPQYNGESTPSPGQLLRCLNYWCGVQVVHHRQQLRAHGVAGDPLERRVRGSGHHRLRAGAGGVARSERASGWSGRLWGRTLCSTDAATGRFACVTGDCGSGRQDCGGGGAAPPATPGRVHHGRQRGHGLLRREPGGRVQPADAGGAAGRGRCRGGQLRAHRLHGGPQRRVPRRPARGGFDDVLRRRRRGLQERVRGVRVGAVLLQRRLREPQHLQAVGVLAVLQERVPPGVQLRLRRRHLHLHLRRRHRVRHHLLPQHDQRQGGRR

SEQ ID NO: 41730 - protein, 201 aa, Zea mays subsp. mays
  peptide (1)..(201): Ceres Seq. ID no. 12418245
  misc_feature (1)..(136): Pfam Name: Pfam Description:  Thaumatin family
  misc_feature (1)..(200): NCBI GI NO: 37531042 NR Description: putative thaumatin-like protein
  misc_feature (1)..(144): NCBI GI NO: 15233437 NR Description: thaumatin-like protein; protein id: At4g36010
  misc_feature (1)..(196): NCBI GI NO: 6273383 NR Description: SCUTL1 [Vitis vinifera]
  misc_feature (1)..(144): NCBI GI NO: 25296204 NR Description: hypothetical protein T20H2.19
  misc_feature (1)..(164): NCBI GI NO: 30692042 NR Description: thaumatin family [Arabidopsis thaliana]
  misc_feature (1)..(144): NCBI GI NO: 30686652 NR Description: thaumatin family [Arabidopsis thaliana]
  misc_feature (1)..(183): NCBI GI NO: 37531036 NR Description: putative thaumatin-like protein
  misc_feature (1)..(155): NCBI GI NO: 15222875 NR Description: thaumatin, putative; protein id: At1g75800
  misc_feature (1)..(137): NCBI GI NO: 4105697 NR Description: thaumatin-like protein [Arabidopsis thaliana]
  misc_feature (1)..(137): NCBI GI NO: 15227907 NR Description: putative thaumatin-like pathogenesis-relatedprotein
MDGSGGMDFYDVSLVDGYNLPMLVAPQGAAAAAGGSCVPTGCMADLNGACPADLRVAASTTSSGGGGVACKSACEAFGSAQYCCNGDYGNPSTCKPSAYSQFFKNACPRAYSYAYDDATSTFTCAGDTAYAITFCPSTTSVKAAGGSPQEQGALPLMNATMVYLGGDQVGSATAAARLPSGLLHHVVVLAVVSLALAGALY

SEQ ID NO: 41731 - protein, 195 aa, Zea mays subsp. mays
  peptide (1)..(195): Ceres Seq. ID no. 12418246
  misc_feature (1)..(130): Pfam Name: Pfam Description:  Thaumatin family
  misc_feature (1)..(194): NCBI GI NO: 37531042 NR Description: putative thaumatin-like protein
  misc_feature (1)..(138): NCBI GI NO: 15233437 NR Description: thaumatin-like protein; protein id: At4g36010
  misc_feature (1)..(190): NCBI GI NO: 6273383 NR Description: SCUTL1 [Vitis vinifera]
  misc_feature (1)..(138): NCBI GI NO: 25296204 NR Description: hypothetical protein T20H2.19
  misc_feature (1)..(158): NCBI GI NO: 30692042 NR Description: thaumatin family [Arabidopsis thaliana]
  misc_feature (1)..(138): NCBI GI NO: 30686652 NR Description: thaumatin family [Arabidopsis thaliana]
  misc_feature (1)..(177): NCBI GI NO: 37531036 NR Description: putative thaumatin-like protein
  misc_feature (1)..(149): NCBI GI NO: 15222875 NR Description: thaumatin, putative; protein id: At1g75800
  misc_feature (1)..(131): NCBI GI NO: 4105697 NR Description: thaumatin-like protein [Arabidopsis thaliana]
  misc_feature (1)..(131): NCBI GI NO: 15227907 NR Description: putative thaumatin-like pathogenesis-relatedprotein
MDFYDVSLVDGYNLPMLVAPQGAAAAAGGSCVPTGCMADLNGACPADLRVAASTTSSGGGGVACKSACEAFGSAQYCCNGDYGNPSTCKPSAYSQFFKNACPRAYSYAYDDATSTFTCAGDTAYAITFCPSTTSVKAAGGSPQEQGALPLMNATMVYLGGDQVGSATAAARLPSGLLHHVVVLAVVSLALAGALY

SEQ ID NO: 41732 - DNA, 419 bp, Zea mays subsp. mays
  misc_feature (1)..(419): Ceres Seq. ID no. 4614060
cggaccacacggtccacacagcccaacaaaggagcgcggcggcccctccttccsttcctcccacttctctcgcgcggcgctcgcttacctcgcctcgcattccgttcgagcaggggagcggcagtgagaagggagggaattaaggcaagatgttcatcgagagcttccgcgtcgagagcccccacgtgcggtacggcccgacsgagatcgagtcggagtaccggtacgacacgacggagctggtgcacgaggccaaggacggcgcctcccgctgggtcgtccgccccaagtccgtcaagtacaacttccggaccagcaccgcggtccccaagctcggggtcatgcttgtggggtggggaggcaacaacgggtccacgcttacggctggggtcattgccaacagggaggggatctcatgg

SEQ ID NO: 41733 - protein, 139 aa, Zea mays subsp. mays
  peptide (1)..(139): Ceres Seq. ID no. 4614061
  misc_feature (24)..(137): Pfam Name: Pfam Description:  Cupin
  misc_feature (18)..(18): Xaa is any aa, unknown or other
  misc_feature (68)..(68): Xaa is any aa, unknown or other
RTTRSTQPNKGARRPLLXFLPLLSRGARLPRLAFRSSRGAAVRREGIKARCSSRASASRAPTCGTARXRSSRSTGTTRRSWCTRPRTAPPAGSSAPSPSSTTSGPAPRSPSSGSCLWGGEATTGPRLRLGSLPTGRGSH

SEQ ID NO: 41734 - protein, 90 aa, Zea mays subsp. mays
  peptide (1)..(90): Ceres Seq. ID no. 4614062
  misc_feature (1)..(89): NCBI GI NO: 11762100 NR Description: myo-inositol 1-phosphate synthase [Zea mays]
  misc_feature (1)..(89): NCBI GI NO: 14548094 NR Description: Inositol-3-phosphate synthase
  misc_feature (1)..(89): NCBI GI NO: 32492882 NR Description: myo-inositol-1-phosphate synthase INO1
  misc_feature (1)..(89): NCBI GI NO: 14548088 NR Description: Inositol-3-phosphate synthase
  misc_feature (1)..(89): NCBI GI NO: 32140125 NR Description: inositol 1-phosphate synthase
  misc_feature (1)..(89): NCBI GI NO: 14548089 NR Description: Inositol-3-phosphate synthase
  misc_feature (1)..(89): NCBI GI NO: 18181983 NR Description: myo-inositol-1-phosphate synthase [Avena sativa]
  misc_feature (1)..(89): NCBI GI NO: 24429925 NR Description: myo-inositol phosphate synthase [Lolium perenne]
  misc_feature (1)..(89): NCBI GI NO: 1170568 NR Description: Inositol-3-phosphate synthase
  misc_feature (1)..(89): NCBI GI NO: 14582467 NR Description: 1L-myo-inositol-1-phosphate synthase
  misc_feature (18)..(18): Xaa is any aa, unknown or other
MFIESFRVESPHVRYGPXEIESEYRYDTTELVHEAKDGASRWVVRPKSVKYNFRTSTAVPKLGVMLVGWGGNNGSTLTAGVIANREGISW

SEQ ID NO: 41735 - DNA, 1860 bp, Zea mays subsp. mays
  misc_feature (1)..(1860): Ceres Seq. ID no. 12391528
acttctcattcctcacttccgtcctcgcgcaccaccccctccatccgttccggatggtgccttcgaaatcccgtccggcgccctagcgtagctcgggctcggccaggctccgggcccgccgcgccgttccgcagtccagctccacctccagatcttttcttgagtttaaggaagatgcttgcctttatttagaaggccctttttggtacgtcagcagtgttctttcctataggagtaaatgccattccgtagcatcgtgcgtgatgtaagggatggtttcgggagcttgtctaggaggggatttgaggtcaggtttctgagtcatcgcagagggaaatctcatggtgctgtccatgagctgcacgacccagtgcttgtggtacagagtagctgctgggctagcttgcctcctgaattacttcgagatgtgattgagaggttggagaccagtgaggatacatggccttctaggaaacatgtagttgcttgtgcagctgtctgcagaacatggagagagatgtgtagagagattgtcaagagcccagagttttctggaaaaatcacttttcctgtttccttgaagcagcctgggcctcgagatggaactattcagtgttttattaagagggataaatctacccaaatctacagtctgtaccttagttttagctctgccgtgcctgtcgaaaatggcaaattccttctatccgcaaaaaggaactgccgtgcaacatatacagaatatataatatcaataaattctggtgatacatctaggtgtacaagtaacaacacatacattgggaaattaaggtcaaatttccttggcacaaaatttgtaatatacgatactcatccgccatacaatggaactagtcaaacagtggcagggaaaacaagtcagagattctactccaagaagggatcaaccaaggtttcttgcaggtggtacagtattgcacaaatctcatacgagctgaatgtcttgggaactcgaggcccaaggcggatgaactgtgtaatgcactccatcccagcttcatgccttgaggctggtggcagtgtcccttgccagccggacagcattgcagcccactctgttggcggatcattcagcagtgtgtccttgtcaaagtcatcgactatggaccactctatgcatttcaccagttcccggctctctgatgccataacaggagatggcattgtgaacagaggccaggcattgaatgatgctgacgatgaagagtgcaaggacatgcctttgatcctccgcaacaaggccccaaggtggcacgagcagcttcagtgctggtgcctcaacttccggggccgggtgactgtcgcctcggtcaagaacttccagctagtcgcggcgacacagcctgccgccggagccctgaccccatcacaggcagccccgcagccagctccgcctcctccgccggaccaagagaaggtcatactgcagtttgggaaggtcggcaaggacatcttcaccatggactactgctacccgctgtcagccttccaggccttcgccatctgcctgagcagcttcgacaccaagttggcctgcgaataaatcctacctacaattctggtacctaccaaataatcaaaaacactgattgtcgtggtgttcgtccaagaaccgagtttagctgagacgccattgggcaccatgtgctggtgccttgttaactcagaaacgcgtgggggctgaatctgtttcagcagcttccttgtgataatctgtagctgctgcttcgctgctgttgtatcctatgctttcatttctttccggttccgctgtagcttcttaccccccggtgacattagttcggtacccgtatctgc

SEQ ID NO: 41736 - protein, 448 aa, Zea mays subsp. mays
  peptide (1)..(448): Ceres Seq. ID no. 12391529
  misc_feature (117)..(448): Pfam Name: Pfam Description:  Tub family
  misc_feature (1)..(448): NCBI GI NO: 15223772 NR Description: Tub family protein, putative; protein id:At1g76900
  misc_feature (1)..(448): NCBI GI NO: 34908598 NR Description: putative tubby protein
  misc_feature (1)..(448): NCBI GI NO: 5777631 NR Description: CAA303719.1 protein [Oryza sativa]
  misc_feature (1)..(448): NCBI GI NO: 15222543 NR Description: F-box containing tubby family protein
  misc_feature (1)..(448): NCBI GI NO: 38637048 NR Description: putative chain A
  misc_feature (1)..(310): NCBI GI NO: 18400968 NR Description: expressed protein; protein id: At1g43640
  misc_feature (291)..(448): NCBI GI NO: 18400968 NR Description: expressed protein; protein id: At1g43640
  misc_feature (18)..(435): NCBI GI NO: 28188613 NR Description: unknown protein [Arabidopsis thaliana]
  misc_feature (18)..(435): NCBI GI NO: 28188595 NR Description: unknown protein [Arabidopsis thaliana]
  misc_feature (18)..(435): NCBI GI NO: 28188615 NR Description: unknown protein [Arabidopsis thaliana]
MPFRSIVRDVRDGFGSLSRRGFEVRFLSHRRGKSHGAVHELHDPVLVVQSSCWASLPPELLRDVIERLETSEDTWPSRKHVVACAAVCRTWREMCREIVKSPEFSGKITFPVSLKQPGPRDGTIQCFIKRDKSTQIYSLYLSFSSAVPVENGKFLLSAKRNCRATYTEYIISINSGDTSRCTSNNTYIGKLRSNFLGTKFVIYDTHPPYNGTSQTVAGKTSQRFYSKKGSTKVSCRWYSIAQISYELNVLGTRGPRRMNCVMHSIPASCLEAGGSVPCQPDSIAAHSVGGSFSSVSLSKSSTMDHSMHFTSSRLSDAITGDGIVNRGQALNDADDEECKDMPLILRNKAPRWHEQLQCWCLNFRGRVTVASVKNFQLVAATQPAAGALTPSQAAPQPAPPPPPDQEKVILQFGKVGKDIFTMDYCYPLSAFQAFAICLSSFDTKLACE

SEQ ID NO: 41737 - protein, 355 aa, Zea mays subsp. mays
  peptide (1)..(355): Ceres Seq. ID no. 12391530
  misc_feature (24)..(355): Pfam Name: Pfam Description:  Tub family
  misc_feature (1)..(355): NCBI GI NO: 15223772 NR Description: Tub family protein, putative; protein id:At1g76900
  misc_feature (1)..(355): NCBI GI NO: 34908598 NR Description: putative tubby protein
  misc_feature (1)..(355): NCBI GI NO: 5777631 NR Description: CAA303719.1 protein [Oryza sativa]
  misc_feature (1)..(355): NCBI GI NO: 15222543 NR Description: F-box containing tubby family protein
  misc_feature (1)..(355): NCBI GI NO: 38637048 NR Description: putative chain A
  misc_feature (1)..(217): NCBI GI NO: 18400968 NR Description: expressed protein; protein id: At1g43640
  misc_feature (198)..(355): NCBI GI NO: 18400968 NR Description: expressed protein; protein id: At1g43640
  misc_feature (1)..(342): NCBI GI NO: 28188613 NR Description: unknown protein [Arabidopsis thaliana]
  misc_feature (1)..(342): NCBI GI NO: 28188595 NR Description: unknown protein [Arabidopsis thaliana]
  misc_feature (1)..(342): NCBI GI NO: 28188615 NR Description: unknown protein [Arabidopsis thaliana]
MCREIVKSPEFSGKITFPVSLKQPGPRDGTIQCFIKRDKSTQIYSLYLSFSSAVPVENGKFLLSAKRNCRATYTEYIISINSGDTSRCTSNNTYIGKLRSNFLGTKFVIYDTHPPYNGTSQTVAGKTSQRFYSKKGSTKVSCRWYSIAQISYELNVLGTRGPRRMNCVMHSIPASCLEAGGSVPCQPDSIAAHSVGGSFSSVSLSKSSTMDHSMHFTSSRLSDAITGDGIVNRGQALNDADDEECKDMPLILRNKAPRWHEQLQCWCLNFRGRVTVASVKNFQLVAATQPAAGALTPSQAAPQPAPPPPPDQEKVILQFGKVGKDIFTMDYCYPLSAFQAFAICLSSFDTKLACE

SEQ ID NO: 41738 - DNA, 1233 bp, Zea mays subsp. mays
  misc_feature (1)..(1233): Ceres Seq. ID no. 12383372
  misc_feature (341)..(341): n is a, c, t, g, unknown, or other
acccgcacacccaccatcagcacgctcccggactctgatggcgctgagccccacgcccacggccgttgctgcaccgccgccggagccgggccccgagcccgcgccgtccgctgagctgccgctgccggacgccatcgcggccgcgctgccgccggacccgtacgagcagctggaggtggcgcgcaagatcacggccgtggccgtggcgtcccgggcctcgcgcctcgagctggaggccgcgcggctacggcagaggctggccgacagggaccgcctcgccgccgagctcgccgacagggccgccaagctcgagcaggcgctccgcgacgccgacgcgcggntccgcagcgcactcgacgacaacgccaagctggccaaggagcgggactcgctcgcgcagacgtccaagaagctggccagggacctcgccaagctggaaaccttcaagcggcacctgatgcagtcgctgggcgatgataattcccaaactcatcatcaggaaacagtagacataagaacctacgagcaatcggtggcaaaagcgaattcctggaaagacgggctagagaagaacagccatcctgtatcctctctatccgacgagtccgtcgaagccgacagcgtaaatcaggaagtgacgacgaggccatttgagcagaaactgaccatcacgcacatcactccacgcctcacctcggatcctgcgccgaagctgagaaccgccgcgacatccccgagaaggtactccacggcggtgtcgcccaaactggcgtccggcgccacctcgccgcgattggagggccacatggcgatgtcgccatggctaccctcgagcaagatgtcctctgcagccaactcgccacctcgtggacagtctatctcaggacgcggtacaagagtagatggcaaggagttctttcgtcaagcaagacaccgcctgtcatacgaacaatttgcggcttttctttccaatatcaaggagctcaacgcccataggcaatctcgagaggagaccctgaggaaggcggacgagatcttcggtgcagaaaacatggacctcttcaggtcgttccaagggctgcttagccgcagcctatcgtagtaaaaaggaaaagaagcttgcccattctatcaattactactccttgttgcggttgttcatgattcatatggacagggccgacagcaggtatacgctttgtgtataataaataaaaaaacgacgtggaccgt

SEQ ID NO: 41739 - protein, 366 aa, Zea mays subsp. mays
  peptide (1)..(366): Ceres Seq. ID no. 12383373
  misc_feature (38)..(365): NCBI GI NO: 30684901 NR Description: expressed protein [Arabidopsis thaliana]
  misc_feature (41)..(362): NCBI GI NO: 15222835 NR Description: hypothetical protein; protein id: At1g56080.1
  misc_feature (36)..(364): NCBI GI NO: 18414476 NR Description: Expressed protein; protein id: At4g15545
  misc_feature (13)..(287): NCBI GI NO: 34909876 NR Description: B1143G03.2
  misc_feature (90)..(312): NCBI GI NO: 34909876 NR Description: B1143G03.2
  misc_feature (41)..(305): NCBI GI NO: 38344261 NR Description: OSJNBa0008M17.14
  misc_feature (20)..(336): NCBI GI NO: 7485048 NR Description: hypothetical protein - Arabidopsis thaliana
  misc_feature (76)..(366): NCBI GI NO: 38344261 NR Description: OSJNBa0008M17.14
  misc_feature (41)..(254): NCBI GI NO: 25404089 NR Description: hypothetical protein T6H22.12
  misc_feature (49)..(209): NCBI GI NO: 23613663 NR Description: hypothetical protein, conserved
  misc_feature (114)..(114): Xaa is any aa, unknown or other
PAHPPSARSRTLMALSPTPTAVAAPPPEPGPEPAPSAELPLPDAIAAALPPDPYEQLEVARKITAVAVASRASRLELEAARLRQRLADRDRLAAELADRAAKLEQALRDADARXRSALDDNAKLAKERDSLAQTSKKLARDLAKLETFKRHLMQSLGDDNSQTHHQETVDIRTYEQSVAKANSWKDGLEKNSHPVSSLSDESVEADSVNQEVTTRPFEQKLTITHITPRLTSDPAPKLRTAATSPRRYSTAVSPKLASGATSPRLEGHMAMSPWLPSSKMSSAANSPPRGQSISGRGTRVDGKEFFRQARHRLSYEQFAAFLSNIKELNAHRQSREETLRKADEIFGAENMDLFRSFQGLLSRSLS

SEQ ID NO: 41740 - protein, 354 aa, Zea mays subsp. mays
  peptide (1)..(354): Ceres Seq. ID no. 12383374
  misc_feature (26)..(353): NCBI GI NO: 30684901 NR Description: expressed protein [Arabidopsis thaliana]
  misc_feature (29)..(350): NCBI GI NO: 15222835 NR Description: hypothetical protein; protein id: At1g56080.1
  misc_feature (24)..(352): NCBI GI NO: 18414476 NR Description: Expressed protein; protein id: At4g15545
  misc_feature (1)..(275): NCBI GI NO: 34909876 NR Description: B1143G03.2
  misc_feature (78)..(300): NCBI GI NO: 34909876 NR Description: B1143G03.2
  misc_feature (29)..(293): NCBI GI NO: 38344261 NR Description: OSJNBa0008M17.14
  misc_feature (8)..(324): NCBI GI NO: 7485048 NR Description: hypothetical protein - Arabidopsis thaliana
  misc_feature (64)..(354): NCBI GI NO: 38344261 NR Description: OSJNBa0008M17.14
  misc_feature (29)..(242): NCBI GI NO: 25404089 NR Description: hypothetical protein T6H22.12
  misc_feature (37)..(197): NCBI GI NO: 23613663 NR Description: hypothetical protein, conserved
  misc_feature (102)..(102): Xaa is any aa, unknown or other
MALSPTPTAVAAPPPEPGPEPAPSAELPLPDAIAAALPPDPYEQLEVARKITAVAVASRASRLELEAARLRQRLADRDRLAAELADRAAKLEQALRDADARXRSALDDNAKLAKERDSLAQTSKKLARDLAKLETFKRHLMQSLGDDNSQTHHQETVDIRTYEQSVAKANSWKDGLEKNSHPVSSLSDESVEADSVNQEVTTRPFEQKLTITHITPRLTSDPAPKLRTAATSPRRYSTAVSPKLASGATSPRLEGHMAMSPWLPSSKMSSAANSPPRGQSISGRGTRVDGKEFFRQARHRLSYEQFAAFLSNIKELNAHRQSREETLRKADEIFGAENMDLFRSFQGLLSRSLS

SEQ ID NO: 41741 - protein, 214 aa, Zea mays subsp. mays
  peptide (1)..(214): Ceres Seq. ID no. 12383375
  misc_feature (1)..(213): NCBI GI NO: 30684901 NR Description: expressed protein [Arabidopsis thaliana]
  misc_feature (1)..(210): NCBI GI NO: 15222835 NR Description: hypothetical protein; protein id: At1g56080.1
  misc_feature (1)..(212): NCBI GI NO: 18414476 NR Description: Expressed protein; protein id: At4g15545
  misc_feature (1)..(135): NCBI GI NO: 34909876 NR Description: B1143G03.2
  misc_feature (1)..(160): NCBI GI NO: 34909876 NR Description: B1143G03.2
  misc_feature (1)..(153): NCBI GI NO: 38344261 NR Description: OSJNBa0008M17.14
  misc_feature (1)..(184): NCBI GI NO: 7485048 NR Description: hypothetical protein - Arabidopsis thaliana
  misc_feature (1)..(214): NCBI GI NO: 38344261 NR Description: OSJNBa0008M17.14
  misc_feature (1)..(102): NCBI GI NO: 25404089 NR Description: hypothetical protein T6H22.12
  misc_feature (1)..(57): NCBI GI NO: 23613663 NR Description: hypothetical protein, conserved
MQSLGDDNSQTHHQETVDIRTYEQSVAKANSWKDGLEKNSHPVSSLSDESVEADSVNQEVTTRPFEQKLTITHITPRLTSDPAPKLRTAATSPRRYSTAVSPKLASGATSPRLEGHMAMSPWLPSSKMSSAANSPPRGQSISGRGTRVDGKEFFRQARHRLSYEQFAAFLSNIKELNAHRQSREETLRKADEIFGAENMDLFRSFQGLLSRSLS

SEQ ID NO: 41742 - DNA, 1909 bp, Zea mays subsp. mays
  misc_feature (1)..(1909): Ceres Seq. ID no. 12435641
atgcatcgggaacccttacacaggtagataccacaaccctgtgcagagttcttgcattctcgtcaaggtgacaggaacgacataggaaatggaggccaccctgtgcccaaagccccatttcgtggtcatcccatggccagccaccagccacatgatccccatcgtggacatcggctgcctcctcgccgcgcacggcgccgcggtcacgatcatcaccacgccctccagctcgcaactcgtccagagccgcgtggaccgcgccgggcaaggctcagcgggggtcacggtcaccgcgatcccgttcccgggcgcggaggccggcctgccggacggctgcgagaggacggaccacatcccctcccctgacctcgtgcccaacttcttcgtcgccaccgcgcggttcggcgaggccgtggcgcggcactgccgccgcctgcccacggccacggcggcgcacccccggccgagctgcgtcgtcgccgggatgtgccacacgtgggcgcacggcgtggcgcgcgagctcggcgccccctgcttcatcttccacggcttctgcgcgttcgctctgctgtgctgcgagtacctcaacacgcacaggccgcacgaggcggtcgggtcgccggacgagctcttcgacctccccgccctgccgccgttcgagttcaggttcgccaggaggcagctgccgatccacttccagccgtcttcctccatcccggaggaccgccaccgggagctccggaagttcgagctggccgtggacggcatcgtcgtgaacagcttcgaggagctggagcacggctcggtttcgcgcctcgcggcggccacgggcaaggccgtgctctccgtcggccccgtctcgctgtgcggcgccgccgcacctcctagcctcctcgactcgcgggccaactcggacgatgccaggctgtgcatggcgtggctggacgccaagagagccgactccgttctctacgtcagcttcggcagcgccgggcgcatgcctccagcgcagctgatacagctcgggctggcgctcgtgtcgtgcccctggcctgtcctttgggtcatcaagggcgcagacacgttgcccgatgacgtcaacgagtggttgcagcgcaacaccgatggaagcggcctcccggagagccagtgtcttgcgcttcgcgggtgggcgccgcaggtcgccatcctggagcacccggccgtcggcggctttctgacgcactgcgggtggggctcgacgctggagagcgtcgccgcgggcgtgcccatggccacctggccgttctccgccgagcagttcctgaacgagaagttgatcgtccacgtgcttggcatcggattgtctgtcggcgtgacgaagcccacggagagcgtgctgaccggtgccaaagacggcggtggcaaggcggacgcagatgtgggaatggaacaggtgaagcaagccttggatatgctcatggatggaggggcggatggggaggcaaggaagacgaaagctaaggaactgaaggccaaatcaaagactgctctggagcatggaggatcgtcatatatgaacctggagaagctgatacagtttggtgcttgaaaatggagtggtcgtggactcgtggtctgtttcggcacccaaacttagtttatttctccctaataaaggttaataaactaggactgcaagcaaaacgtggtacatgtaggtttcaggaacgctgcaggccgggcaaactttgtccaggattgcgagtggacaggacaggagcagaggaaaaacggcaacagaagcgacaaaatgaagagtaacaaagagccgttggattgaagatcaatgactcatgtgcgttgcctaagaattagacatatagtcatatgagcgtcttctctatgatacctgaggtttcttcgattc

SEQ ID NO: 41743 - protein, 500 aa, Zea mays subsp. mays
  peptide (1)..(500): Ceres Seq. ID no. 12435642
  misc_feature (7)..(497): NCBI GI NO: 22208467 NR Description: putative glucosyl transferase [Sorghum bicolor]
  misc_feature (8)..(497): NCBI GI NO: 34910296 NR Description: putative glucosyl transferase
  misc_feature (1)..(497): NCBI GI NO: 15231757 NR Description: glucosyltransferase - like protein
  misc_feature (10)..(497): NCBI GI NO: 34910292 NR Description: putative glucosyl transferase
  misc_feature (7)..(497): NCBI GI NO: 15228034 NR Description: putative glucosyl transferase
  misc_feature (1)..(497): NCBI GI NO: 15228031 NR Description: putative glucosyl transferase
  misc_feature (10)..(497): NCBI GI NO: 34910294 NR Description: putative glucosyl transferase
  misc_feature (7)..(497): NCBI GI NO: 15228035 NR Description: putative glucosyl transferase
  misc_feature (7)..(497): NCBI GI NO: 26450153 NR Description: putative glucosyl transferase
  misc_feature (2)..(497): NCBI GI NO: 15228037 NR Description: putative glucosyl transferase
MEATLCPKPHFVVIPWPATSHMIPIVDIGCLLAAHGAAVTIITTPSSSQLVQSRVDRAGQGSAGVTVTAIPFPGAEAGLPDGCERTDHIPSPDLVPNFFVATARFGEAVARHCRRLPTATAAHPRPSCVVAGMCHTWAHGVARELGAPCFIFHGFCAFALLCCEYLNTHRPHEAVGSPDELFDLPALPPFEFRFARRQLPIHFQPSSSIPEDRHRELRKFELAVDGIVVNSFEELEHGSVSRLAAATGKAVLSVGPVSLCGAAAPPSLLDSRANSDDARLCMAWLDAKRADSVLYVSFGSAGRMPPAQLIQLGLALVSCPWPVLWVIKGADTLPDDVNEWLQRNTDGSGLPESQCLALRGWAPQVAILEHPAVGGFLTHCGWGSTLESVAAGVPMATWPFSAEQFLNEKLIVHVLGIGLSVGVTKPTESVLTGAKDGGGKADADVGMEQVKQALDMLMDGGADGEARKTKAKELKAKSKTALEHGGSSYMNLEKLIQFGA

SEQ ID NO: 41744 - protein, 479 aa, Zea mays subsp. mays
  peptide (1)..(479): Ceres Seq. ID no. 12435643
  misc_feature (1)..(476): NCBI GI NO: 22208467 NR Description: putative glucosyl transferase [Sorghum bicolor]
  misc_feature (1)..(476): NCBI GI NO: 34910296 NR Description: putative glucosyl transferase
  misc_feature (1)..(476): NCBI GI NO: 15231757 NR Description: glucosyltransferase - like protein
  misc_feature (1)..(476): NCBI GI NO: 34910292 NR Description: putative glucosyl transferase
  misc_feature (1)..(476): NCBI GI NO: 15228034 NR Description: putative glucosyl transferase
  misc_feature (1)..(476): NCBI GI NO: 15228031 NR Description: putative glucosyl transferase
  misc_feature (1)..(476): NCBI GI NO: 34910294 NR Description: putative glucosyl transferase
  misc_feature (1)..(476): NCBI GI NO: 15228035 NR Description: putative glucosyl transferase
  misc_feature (1)..(476): NCBI GI NO: 26450153 NR Description: putative glucosyl transferase
  misc_feature (1)..(476): NCBI GI NO: 15228037 NR Description: putative glucosyl transferase
MIPIVDIGCLLAAHGAAVTIITTPSSSQLVQSRVDRAGQGSAGVTVTAIPFPGAEAGLPDGCERTDHIPSPDLVPNFFVATARFGEAVARHCRRLPTATAAHPRPSCVVAGMCHTWAHGVARELGAPCFIFHGFCAFALLCCEYLNTHRPHEAVGSPDELFDLPALPPFEFRFARRQLPIHFQPSSSIPEDRHRELRKFELAVDGIVVNSFEELEHGSVSRLAAATGKAVLSVGPVSLCGAAAPPSLLDSRANSDDARLCMAWLDAKRADSVLYVSFGSAGRMPPAQLIQLGLALVSCPWPVLWVIKGADTLPDDVNEWLQRNTDGSGLPESQCLALRGWAPQVAILEHPAVGGFLTHCGWGSTLESVAAGVPMATWPFSAEQFLNEKLIVHVLGIGLSVGVTKPTESVLTGAKDGGGKADADVGMEQVKQALDMLMDGGADGEARKTKAKELKAKSKTALEHGGSSYMNLEKLIQFGA

SEQ ID NO: 41745 - protein, 368 aa, Zea mays subsp. mays
  peptide (1)..(368): Ceres Seq. ID no. 12435644
  misc_feature (1)..(365): NCBI GI NO: 22208467 NR Description: putative glucosyl transferase [Sorghum bicolor]
  misc_feature (1)..(365): NCBI GI NO: 34910296 NR Description: putative glucosyl transferase
  misc_feature (1)..(365): NCBI GI NO: 15231757 NR Description: glucosyltransferase - like protein
  misc_feature (1)..(365): NCBI GI NO: 34910292 NR Description: putative glucosyl transferase
  misc_feature (1)..(365): NCBI GI NO: 15228034 NR Description: putative glucosyl transferase
  misc_feature (1)..(365): NCBI GI NO: 15228031 NR Description: putative glucosyl transferase
  misc_feature (1)..(365): NCBI GI NO: 34910294 NR Description: putative glucosyl transferase
  misc_feature (1)..(365): NCBI GI NO: 15228035 NR Description: putative glucosyl transferase
  misc_feature (1)..(365): NCBI GI NO: 26450153 NR Description: putative glucosyl transferase
  misc_feature (1)..(365): NCBI GI NO: 15228037 NR Description: putative glucosyl transferase
MCHTWAHGVARELGAPCFIFHGFCAFALLCCEYLNTHRPHEAVGSPDELFDLPALPPFEFRFARRQLPIHFQPSSSIPEDRHRELRKFELAVDGIVVNSFEELEHGSVSRLAAATGKAVLSVGPVSLCGAAAPPSLLDSRANSDDARLCMAWLDAKRADSVLYVSFGSAGRMPPAQLIQLGLALVSCPWPVLWVIKGADTLPDDVNEWLQRNTDGSGLPESQCLALRGWAPQVAILEHPAVGGFLTHCGWGSTLESVAAGVPMATWPFSAEQFLNEKLIVHVLGIGLSVGVTKPTESVLTGAKDGGGKADADVGMEQVKQALDMLMDGGADGEARKTKAKELKAKSKTALEHGGSSYMNLEKLIQFGA

SEQ ID NO: 41746 - DNA, 989 bp, Zea mays subsp. mays; identical to SEQ ID NO: 40176
  misc_feature (1)..(989): Ceres Seq. ID no. 12378246

SEQ ID NO: 41747 - protein, 319 aa, Zea mays subsp. mays; identical to SEQ ID NO: 40177
  peptide (1)..(319): Ceres Seq. ID no. 12378247

SEQ ID NO: 41748 - protein, 245 aa, Zea mays subsp. mays; identical to SEQ ID NO: 40178
  peptide (1)..(245): Ceres Seq. ID no. 12378248
  misc_feature (28)..(243): Pfam Name: Pfam Description:  Dienelactone hydrolase family
  misc_feature (5)..(244): NCBI GI NO: 18399662 NR Description: expressed protein; protein id: At1g35420
  misc_feature (5)..(244): NCBI GI NO: 21553574 NR Description: unknown [Arabidopsis thaliana]
  misc_feature (26)..(243): NCBI GI NO: 34854915 NR Description: similar to Ab2-225 [Rattus norvegicus]
  misc_feature (26)..(243): NCBI GI NO: 20270371 NR Description: hypothetical protein BC001573 [Homo sapiens]
  misc_feature (26)..(243): NCBI GI NO: 18676733 NR Description: unnamed protein product [Homo sapiens]
  misc_feature (29)..(243): NCBI GI NO: 40253303 NR Description: putative Endo-1,3;1,4-beta-D-glucanase precursor
  misc_feature (8)..(243): NCBI GI NO: 40253306 NR Description: putative Endo-1,3;1,4-beta-D-glucanase precursor

SEQ ID NO: 41749 - DNA, 1101 bp, Zea mays subsp. mays
  misc_feature (1)..(1101): Ceres Seq. ID no. 13600500
tggattgactggtttgcagacgtggaaatacccaattcctcagggtgaaatacatcatgtcatgaaccctgatccttatcgggggactttcgggtctgatgctgcagcttatgctaaggaagtcgaagaacacataacttatggaagttcaggaagggttgcaggcttcattgcagaaacattccaaggtgtgggaggtgctgttgaactagctcctggatacctaaagttagcttatgacattgtgcgcaaggctggtggcgtttgtattgctgatgaagtccagagtggttttggccgtactggcagtcattactggggattccagacacaaggtgtcattcctgacatagtcaccatggcaaagggaattggcaatggcctaccattgggggcagttgtgacaactcctgagattgcaagtgtgttagctcaaaaaatccaatttaacacatttggtggaaatccagtttgttctgctggtgggttagctgtgcttaaggttcttgacaaggagaaacgccaggcacattgtgctgatgttggatctcacttgttggagcgtctaaaatcgcttcaggagaagcacgaaatcataggtgatgttagaggaaggggactgatgcttggggtggaactcgttacgggcagaaaggagaagacccctgccaagtcagaaaccattgaactgtttgagaagctcagagatctcggggtactagttggaaagggcggtctgcatcgtaacgtcttcagaataaaaccaccgatgtgcttttcgaaggacgatgcagacttcttggtggactccatggactacgcaatgtcaaggctctgaaggaacatgctctgagttgacaatgtgtctgcgtggaaacaacacttcctgcaaccgcaagatgcatggcctgaaatgaaactgaaaggcagatgatttaatgggcatgctccccgggtggtatgttggtgttatggtgaagtttaatagtccccctcccccgaataaattgatgaaaggggacagaacgtcttgcccagcttgtgaactgtttgtagaagaactgcagttaataaatagaatagcgagcaagcaagcgtgat

SEQ ID NO: 41750 - protein, 278 aa, Zea mays subsp. mays
  peptide (1)..(278): Ceres Seq. ID no. 13600501
  misc_feature (1)..(278): Pfam Name: Pfam Description:  Aminotransferase class-III
  misc_feature (1)..(278): NCBI GI NO: 5731259 NR Description: alanine:glyoxylate aminotransferase 2 homolog
  misc_feature (1)..(278): NCBI GI NO: 18420498 NR Description: alanine--glyoxylate aminotransferase
  misc_feature (1)..(278): NCBI GI NO: 15231974 NR Description: alanine--glyoxylate aminotransferase
  misc_feature (47)..(268): NCBI GI NO: 7434175 NR Description: hypothetical protein T19P19
  misc_feature (1)..(278): NCBI GI NO: 15224499 NR Description: alanine--glyoxylate aminotransferase
  misc_feature (1)..(278): NCBI GI NO: 15028237 NR Description: putative beta-alanine-pyruvate aminotransferase
  misc_feature (29)..(276): NCBI GI NO: 16198011 NR Description: LD24726p [Drosophila melanogaster]
  misc_feature (29)..(276): NCBI GI NO: 28574759 NR Description: CG11241-PA [Drosophila melanogaster]
  misc_feature (49)..(263): NCBI GI NO: 31239473 NR Description: ENSANGP00000008948 [Anopheles gambiae]
  misc_feature (37)..(269): NCBI GI NO: 39595899 NR Description: Hypothetical protein CBG12888
GLTGLQTWKYPIPQGEIHHVMNPDPYRGTFGSDAAAYAKEVEEHITYGSSGRVAGFIAETFQGVGGAVELAPGYLKLAYDIVRKAGGVCIADEVQSGFGRTGSHYWGFQTQGVIPDIVTMAKGIGNGLPLGAVVTTPEIASVLAQKIQFNTFGGNPVCSAGGLAVLKVLDKEKRQAHCADVGSHLLERLKSLQEKHEIIGDVRGRGLMLGVELVTGRKEKTPAKSETIELFEKLRDLGVLVGKGGLHRNVFRIKPPMCFSKDDADFLVDSMDYAMSRL

SEQ ID NO: 41751 - protein, 258 aa, Zea mays subsp. mays
  peptide (1)..(258): Ceres Seq. ID no. 13600502
  misc_feature (1)..(258): Pfam Name: Pfam Description:  Aminotransferase class-III
  misc_feature (1)..(258): NCBI GI NO: 5731259 NR Description: alanine:glyoxylate aminotransferase 2 homolog
  misc_feature (1)..(258): NCBI GI NO: 18420498 NR Description: alanine--glyoxylate aminotransferase
  misc_feature (1)..(258): NCBI GI NO: 15231974 NR Description: alanine--glyoxylate aminotransferase
  misc_feature (27)..(248): NCBI GI NO: 7434175 NR Description: hypothetical protein T19P19
  misc_feature (1)..(258): NCBI GI NO: 15224499 NR Description: alanine--glyoxylate aminotransferase
  misc_feature (1)..(258): NCBI GI NO: 15028237 NR Description: putative beta-alanine-pyruvate aminotransferase
  misc_feature (9)..(256): NCBI GI NO: 16198011 NR Description: LD24726p [Drosophila melanogaster]
  misc_feature (9)..(256): NCBI GI NO: 28574759 NR Description: CG11241-PA [Drosophila melanogaster]
  misc_feature (29)..(243): NCBI GI NO: 31239473 NR Description: ENSANGP00000008948 [Anopheles gambiae]
  misc_feature (17)..(249): NCBI GI NO: 39595899 NR Description: Hypothetical protein CBG12888
MNPDPYRGTFGSDAAAYAKEVEEHITYGSSGRVAGFIAETFQGVGGAVELAPGYLKLAYDIVRKAGGVCIADEVQSGFGRTGSHYWGFQTQGVIPDIVTMAKGIGNGLPLGAVVTTPEIASVLAQKIQFNTFGGNPVCSAGGLAVLKVLDKEKRQAHCADVGSHLLERLKSLQEKHEIIGDVRGRGLMLGVELVTGRKEKTPAKSETIELFEKLRDLGVLVGKGGLHRNVFRIKPPMCFSKDDADFLVDSMDYAMSRL

SEQ ID NO: 41752 - protein, 159 aa, Zea mays subsp. mays
  peptide (1)..(159): Ceres Seq. ID no. 13600503
  misc_feature (1)..(159): Pfam Name: Pfam Description:  Aminotransferase class-III
  misc_feature (1)..(159): NCBI GI NO: 5731259 NR Description: alanine:glyoxylate aminotransferase 2 homolog
  misc_feature (1)..(159): NCBI GI NO: 18420498 NR Description: alanine--glyoxylate aminotransferase
  misc_feature (1)..(159): NCBI GI NO: 15231974 NR Description: alanine--glyoxylate aminotransferase
  misc_feature (1)..(149): NCBI GI NO: 7434175 NR Description: hypothetical protein T19P19
  misc_feature (1)..(159): NCBI GI NO: 15224499 NR Description: alanine--glyoxylate aminotransferase
  misc_feature (1)..(159): NCBI GI NO: 15028237 NR Description: putative beta-alanine-pyruvate aminotransferase
  misc_feature (1)..(157): NCBI GI NO: 16198011 NR Description: LD24726p [Drosophila melanogaster]
  misc_feature (1)..(157): NCBI GI NO: 28574759 NR Description: CG11241-PA [Drosophila melanogaster]
  misc_feature (1)..(144): NCBI GI NO: 31239473 NR Description: ENSANGP00000008948 [Anopheles gambiae]
  misc_feature (1)..(150): NCBI GI NO: 39595899 NR Description: Hypothetical protein CBG12888
MAKGIGNGLPLGAVVTTPEIASVLAQKIQFNTFGGNPVCSAGGLAVLKVLDKEKRQAHCADVGSHLLERLKSLQEKHEIIGDVRGRGLMLGVELVTGRKEKTPAKSETIELFEKLRDLGVLVGKGGLHRNVFRIKPPMCFSKDDADFLVDSMDYAMSRL

SEQ ID NO: 41753 - DNA, 497 bp, Zea mays subsp. mays
  misc_feature (1)..(497): Ceres Seq. ID no. 12589112
gaaaaatccccagcccaaaatgaacgccaccaccgccgtggctgcgaggcgcctcctcctcccgctccgcgcccagccgccagcaccgcggggcgcagcgccggcctcggcgcacccctggtgtcgatccgttccgcggagacgacgagtccgtgccgccccggcgcgcgcgtcgctggaccgcgccgcggtcctcctcgacaccgcggccgcggtggccaacggcgggacaggttactcgcaggcgagctactacacgtctctgggactcttcgttctctccgttccggggctgtggtccctcatcaagcgctccgtcaagtccaagattgtgcaaaagacatttgtgaaagacgatggacagtcgatggcgccaaatcaggtggctggagagatcctgtcgttcttcactcgcaataacttcaccgtctcagaccgcggtgaggtcatcacattcgagggcacaatgataccaaacagaggccaggcggcgctgc

SEQ ID NO: 41754 - protein, 165 aa, Zea mays subsp. mays
  peptide (1)..(165): Ceres Seq. ID no. 13586476
  misc_feature (78)..(164): NCBI GI NO: 18405058 NR Description: expressed protein; protein id: At3g26710
  misc_feature (78)..(151): NCBI GI NO: 1402889 NR Description: unknown [Arabidopsis thaliana]
KNPQPKMNATTAVAARRLLLPLRAQPPAPRGAAPASAHPWCRSVPRRRRVRAAPARASLDRAAVLLDTAAAVANGGTGYSQASYYTSLGLFVLSVPGLWSLIKRSVKSKIVQKTFVKDDGQSMAPNQVAGEILSFFTRNNFTVSDRGEVITFEGTMIPNRGQAAL

SEQ ID NO: 41755 - protein, 159 aa, Zea mays subsp. mays
  peptide (1)..(159): Ceres Seq. ID no. 13586477
  misc_feature (72)..(158): NCBI GI NO: 18405058 NR Description: expressed protein; protein id: At3g26710
  misc_feature (72)..(145): NCBI GI NO: 1402889 NR Description: unknown [Arabidopsis thaliana]
MNATTAVAARRLLLPLRAQPPAPRGAAPASAHPWCRSVPRRRRVRAAPARASLDRAAVLLDTAAAVANGGTGYSQASYYTSLGLFVLSVPGLWSLIKRSVKSKIVQKTFVKDDGQSMAPNQVAGEILSFFTRNNFTVSDRGEVITFEGTMIPNRGQAAL

SEQ ID NO: 41756 - protein, 139 aa, Zea mays subsp. mays
  peptide (1)..(139): Ceres Seq. ID no. 13586478
EKSPAQNERHHRRGCEAPPPPAPRPAASTAGRSAGLGAPLVSIRSAETTSPCRPGARVAGPRRGPPRHRGRGGQRRDRLLAGELLHVSGTLRSLRSGAVVPHQALRQVQDCAKDICERRWTVDGAKSGGWRDPVVLHSQ

SEQ ID NO: 41757 - DNA, 1826 bp, Zea mays subsp. mays
  misc_feature (1)..(1826): Ceres Seq. ID no. 12387680
gcacgagaccattacctagaacatcctaatcgaaaagtactgtacatcgacatgcgacatcttgcttggcctatctgatctttaatgtcgccgcgcacagagaggagatccggtctcatgaagtggctctgcagattcctcaaggggccgaagcccggcgaaccgagccgccggcggccccaggtggcggccggagaaggggagggcgcgctttggcaccaacgaccagctagaccaaagatcgatccacctaggaacgagaatgaggaactagtggaccgtgccattgccgagcctcttgcagaggctgtcaaaccgcccagagagaaaacccataggggagaagacagcaacgacgacgaagatctcacaagagccgtacaggacagtctgaatatgaacccttacacgccttacaacccctatccaccctctcaagcccaacctatagggcacagggtatgcggaggctgcaagcatgagatagggcgtggccattacttgagctgcatgggcatttactggcaccctcagtgcttccgctgcaggtcctgcggtcaccttatccgtgagaccgagttcaccttgctgggtacggattcgtaccacaagctgtgctacaaggagctgcatcatccaaagtgcgacgtctgccttcagtttgtaaggcctcgtgtcctcggaaaacctgaggcgatctgcactgcagactgtgataaactgcatcccaacgaacgggagtggcttgatagagtacagagcccacccgttctggggccagaagtattgcccttcgcatgagcgcgacaggacgccacgttgctgcagctgtgagaaaatggaggtacagccaaggaacacgaagtacatgtcgctgggagacggacgcggcctgtgcatggaatgcctgggatctgcagtgatggacacgagcgagtgccagcctctgtaccattctatcagatactactacgaggggatggacatgagactggaccagcagatacccgtgctcttggttgagcggcaagcgctcaacgaagccatggaaggggagagtaaaggcccacaccacatgcctgagactaggggcctatgtctgtccgaggagcggactgtgagcagtatacttaggaggcccagaattggtggaaaccggttactaggcatgagaactcggccacagaagctgacgaggagatgtgaagttactgcaatacttgtcctgtatggcctccccaggctactgacaggttccatcctcgcccatgagctgatgcacgggtggctgcgcctcaaaggttaccgaaacctaaacgcggaggtggaagaaggcatatgccaggtcatgtcttacttgtggctggaatcagagattcttccgtcatcctcgaggcacgcgcagccttcatcatcgtcctcctcctcatcctatccagcaacatcatccgagaaaggtggaatatctcataccgggaagaagctgggcgagttcttcatgcaccagattgccaatgacacgtcgacggcctatggtgacgggttcagaactgcgtacgctgccgtcaacaagtatggccttcgccaaacactgagccatatacgcctaacaggaggcttccctgtataataagagtgacaaaaaagacacaaaatgtccatgcatgatcatatcgatatcaaaaggttatatacatattgggatgaagttcgctatggaagcatagtgattcagtttcggtgaccttgagttttcaaagaggtcatgtgtaagaacactgatttaggggtggaggtatgccgcttccggcatatgatttcctctc

SEQ ID NO: 41758 - protein, 263 aa, Zea mays subsp. mays
  peptide (1)..(263): Ceres Seq. ID no. 12387681
  misc_feature (1)..(263): NCBI GI NO: 29893641 NR Description: hypothetical protein
  misc_feature (1)..(262): NCBI GI NO: 17065046 NR Description: Unknown protein [Arabidopsis thaliana]
  misc_feature (1)..(263): NCBI GI NO: 15221983 NR Description: unknown protein; protein id: At1g19270.1
  misc_feature (1)..(258): NCBI GI NO: 25518496 NR Description: hypothetical protein T29M8
  misc_feature (1)..(262): NCBI GI NO: 22329212 NR Description: putative protein; protein id: At4g36860
  misc_feature (1)..(262): NCBI GI NO: 25407769 NR Description: hypothetical protein AT4g36860
  misc_feature (1)..(98): NCBI GI NO: 15225574 NR Description: hypothetical protein; protein id: At2g39830.1
  misc_feature (152)..(263): NCBI GI NO: 15225574 NR Description: hypothetical protein; protein id: At2g39830.1
  misc_feature (1)..(255): NCBI GI NO: 15240018 NR Description: putative protein; protein id: At5g66620.1
  misc_feature (1)..(256): NCBI GI NO: 15240017 NR Description: putative protein; protein id: At5g66610.1
MEVQPRNTKYMSLGDGRGLCMECLGSAVMDTSECQPLYHSIRYYYEGMDMRLDQQIPVLLVERQALNEAMEGESKGPHHMPETRGLCLSEERTVSSILRRPRIGGNRLLGMRTRPQKLTRRCEVTAILVLYGLPRLLTGSILAHELMHGWLRLKGYRNLNAEVEEGICQVMSYLWLESEILPSSSRHAQPSSSSSSSSYPATSSEKGGISHTGKKLGEFFMHQIANDTSTAYGDGFRTAYAAVNKYGLRQTLSHIRLTGGFPV

SEQ ID NO: 41759 - protein, 253 aa, Zea mays subsp. mays
  peptide (1)..(253): Ceres Seq. ID no. 12387682
  misc_feature (1)..(253): NCBI GI NO: 29893641 NR Description: hypothetical protein
  misc_feature (1)..(252): NCBI GI NO: 17065046 NR Description: Unknown protein [Arabidopsis thaliana]
  misc_feature (1)..(253): NCBI GI NO: 15221983 NR Description: unknown protein; protein id: At1g19270.1
  misc_feature (1)..(248): NCBI GI NO: 25518496 NR Description: hypothetical protein T29M8
  misc_feature (1)..(252): NCBI GI NO: 22329212 NR Description: putative protein; protein id: At4g36860
  misc_feature (1)..(252): NCBI GI NO: 25407769 NR Description: hypothetical protein AT4g36860
  misc_feature (1)..(88): NCBI GI NO: 15225574 NR Description: hypothetical protein; protein id: At2g39830.1
  misc_feature (142)..(253): NCBI GI NO: 15225574 NR Description: hypothetical protein; protein id: At2g39830.1
  misc_feature (1)..(245): NCBI GI NO: 15240018 NR Description: putative protein; protein id: At5g66620.1
  misc_feature (1)..(246): NCBI GI NO: 15240017 NR Description: putative protein; protein id: At5g66610.1
MSLGDGRGLCMECLGSAVMDTSECQPLYHSIRYYYEGMDMRLDQQIPVLLVERQALNEAMEGESKGPHHMPETRGLCLSEERTVSSILRRPRIGGNRLLGMRTRPQKLTRRCEVTAILVLYGLPRLLTGSILAHELMHGWLRLKGYRNLNAEVEEGICQVMSYLWLESEILPSSSRHAQPSSSSSSSSYPATSSEKGGISHTGKKLGEFFMHQIANDTSTAYGDGFRTAYAAVNKYGLRQTLSHIRLTGGFPV

SEQ ID NO: 41760 - protein, 243 aa, Zea mays subsp. mays
  peptide (1)..(243): Ceres Seq. ID no. 12387683
  misc_feature (1)..(243): NCBI GI NO: 29893641 NR Description: hypothetical protein
  misc_feature (1)..(242): NCBI GI NO: 17065046 NR Description: Unknown protein [Arabidopsis thaliana]
  misc_feature (1)..(243): NCBI GI NO: 15221983 NR Description: unknown protein; protein id: At1g19270.1
  misc_feature (1)..(238): NCBI GI NO: 25518496 NR Description: hypothetical protein T29M8
  misc_feature (1)..(242): NCBI GI NO: 22329212 NR Description: putative protein; protein id: At4g36860
  misc_feature (1)..(242): NCBI GI NO: 25407769 NR Description: hypothetical protein AT4g36860
  misc_feature (1)..(78): NCBI GI NO: 15225574 NR Description: hypothetical protein; protein id: At2g39830.1
  misc_feature (132)..(243): NCBI GI NO: 15225574 NR Description: hypothetical protein; protein id: At2g39830.1
  misc_feature (1)..(235): NCBI GI NO: 15240018 NR Description: putative protein; protein id: At5g66620.1
  misc_feature (1)..(236): NCBI GI NO: 15240017 NR Description: putative protein; protein id: At5g66610.1
MECLGSAVMDTSECQPLYHSIRYYYEGMDMRLDQQIPVLLVERQALNEAMEGESKGPHHMPETRGLCLSEERTVSSILRRPRIGGNRLLGMRTRPQKLTRRCEVTAILVLYGLPRLLTGSILAHELMHGWLRLKGYRNLNAEVEEGICQVMSYLWLESEILPSSSRHAQPSSSSSSSSYPATSSEKGGISHTGKKLGEFFMHQIANDTSTAYGDGFRTAYAAVNKYGLRQTLSHIRLTGGFPV

SEQ ID NO: 41761 - DNA, 1863 bp, Zea mays subsp. mays
  misc_feature (1)..(1863): Ceres Seq. ID no. 12383411
gcacgagaccattacctagaacatcctaatcgaaaagcatcgccgcatctttccaccttccctcccctccactcccgcaatctcgtctccgccgtccgccgccgcgccgtagcaaggtaacagagatcacaacaagttaaagcctcaaggaatgctgaaagatgtgctttcctagaagatatttctgttgcgacatcaaggaccttgctgctccccgagggctgctgatctgctcaactcttgatgacctgatctgcatcgattctacaacgttcagactgcgccacgaccaagccataagagtactgttcaccgtcatggatcatgacatgggggaggaaggctaactctttgcccagtcccacctgattggcgccagcagtgtgatttatactttttgcagagagagaagatatggagtcgacaggaaagattttgatggagcggtatgaggtggggaggctactggggaaaggcacatttggcaaggtgcactacgcaaagaatcttgagtccaacgagagtgttgccattaagatgatggacaaggacaaagtgctcaaggccgggctttcggagcagataaggcgggagatcacaacgatgcggttggtggctcataagaacattgttgagcttcatgaggtcatggcgacgcggaacaacatctactttgtcatggagtatgtgaaaggcggagagctctttgacaagattggcaagagtggcaagctcacagaggccgctgcacacaagtacttccagcagctcattggtgcggtggattactgccacagccgaggtgtgtatcaccgggacttgaagcctgagaaccttctgttggatgagaatgagaacctcaaggtctcagattttggactgagtgcactttcagaatcccaagggggcaagatggcttactccacaccacctgtgggactccagcatatgtagctccagaggtgatcagcaagacaggctatgatggggcaaagtcagacatctggtcctgtggtgttgttctatttgtactagttgctggttatcttcctttccgggccccaaacatgatggagatgtatcgcaagatacagaatggtgatttcaggtgccctagttggttttcacacaaactcaagaagctcttgtacaagatcctcgaccccagcccagacacaagaatttcagtgcagaagataaaagagtctacctggtttcgaaaaggccctgtggagacccgtacagtaaaggagaaaattctgagtgagaatgacaccacaaatgctgctccagccgttgctatgaggcgcaagaagaatgttcatgaagacgtgaagcccccgactgtcacaagcttaaacgcctttgaaattatatctttctccacaggattggacctctctggcctatttatcagaaaggagtgtaagaaggagacgcggttcacttctgataagggtgccgtgtccatcatctcgaagcttgaagatgttgcaaaagcactgaatctcagggtaaggaagaaggacaatggtgttgtcaagattcaggggaggaaggtggggaggaagggtgtcctggagttcgacactgaaatatttgagatcacggcatcctaccacctcatcgagatgaaacaaacgggcggtgattcacttgagtacaagaaactgttggaagaggacatccggccagcactgaaggacatagtctgggcctggcatggagatgaccagcaacaaaagtagtagctttggatctctcttttttgttccataaaattgttagatctttcacttcagattgattttgttcgacatgtgcgtgttcttcttactagttacattctttctgtttctgtgg

SEQ ID NO: 41762 - protein, 226 aa, Zea mays subsp. mays
  peptide (1)..(226): Ceres Seq. ID no. 12383412
  misc_feature (1)..(222): NCBI GI NO: 7446440 NR Description: protein kinase homolog - rice
  misc_feature (1)..(226): NCBI GI NO: 23428550 NR Description: Serine/threonine Kinase [Persea americana]
  misc_feature (1)..(222): NCBI GI NO: 34907870 NR Description: putative serine/threonine protein kinase
  misc_feature (1)..(226): NCBI GI NO: 15240687 NR Description: serine threonine protein kinase-like protein
  misc_feature (1)..(226): NCBI GI NO: 9280636 NR Description: CBL-interacting protein kinase 2
  misc_feature (1)..(226): NCBI GI NO: 7446373 NR Description: probable serine/threonine protein kinase (EC2
  misc_feature (1)..(224): NCBI GI NO: 8777339 NR Description: serine/threonine protein kinase
  misc_feature (1)..(224): NCBI GI NO: 18424099 NR Description: serine/threonine protein kinase
  misc_feature (1)..(222): NCBI GI NO: 15242509 NR Description: serine threonine protein kinase
  misc_feature (1)..(222): NCBI GI NO: 18420882 NR Description: serine/threonine protein kinase-like protein
MMEMYRKIQNGDFRCPSWFSHKLKKLLYKILDPSPDTRISVQKIKESTWFRKGPVETRTVKEKILSENDTTNAAPAVAMRRKKNVHEDVKPPTVTSLNAFEIISFSTGLDLSGLFIRKECKKETRFTSDKGAVSIISKLEDVAKALNLRVRKKDNGVVKIQGRKVGRKGVLEFDTEIFEITASYHLIEMKQTGGDSLEYKKLLEEDIRPALKDIVWAWHGDDQQQK

SEQ ID NO: 41763 - protein, 225 aa, Zea mays subsp. mays
  peptide (1)..(225): Ceres Seq. ID no. 12383413
  misc_feature (1)..(221): NCBI GI NO: 7446440 NR Description: protein kinase homolog - rice
  misc_feature (1)..(225): NCBI GI NO: 23428550 NR Description: Serine/threonine Kinase [Persea americana]
  misc_feature (1)..(221): NCBI GI NO: 34907870 NR Description: putative serine/threonine protein kinase
  misc_feature (1)..(225): NCBI GI NO: 15240687 NR Description: serine threonine protein kinase-like protein
  misc_feature (1)..(225): NCBI GI NO: 9280636 NR Description: CBL-interacting protein kinase 2
  misc_feature (1)..(225): NCBI GI NO: 7446373 NR Description: probable serine/threonine protein kinase (EC2
  misc_feature (1)..(223): NCBI GI NO: 8777339 NR Description: serine/threonine protein kinase
  misc_feature (1)..(223): NCBI GI NO: 18424099 NR Description: serine/threonine protein kinase
  misc_feature (1)..(221): NCBI GI NO: 15242509 NR Description: serine threonine protein kinase
  misc_feature (1)..(221): NCBI GI NO: 18420882 NR Description: serine/threonine protein kinase-like protein
MEMYRKIQNGDFRCPSWFSHKLKKLLYKILDPSPDTRISVQKIKESTWFRKGPVETRTVKEKILSENDTTNAAPAVAMRRKKNVHEDVKPPTVTSLNAFEIISFSTGLDLSGLFIRKECKKETRFTSDKGAVSIISKLEDVAKALNLRVRKKDNGVVKIQGRKVGRKGVLEFDTEIFEITASYHLIEMKQTGGDSLEYKKLLEEDIRPALKDIVWAWHGDDQQQK

SEQ ID NO: 41764 - protein, 223 aa, Zea mays subsp. mays
  peptide (1)..(223): Ceres Seq. ID no. 12383414
  misc_feature (1)..(219): NCBI GI NO: 7446440 NR Description: protein kinase homolog - rice
  misc_feature (1)..(223): NCBI GI NO: 23428550 NR Description: Serine/threonine Kinase [Persea americana]
  misc_feature (1)..(219): NCBI GI NO: 34907870 NR Description: putative serine/threonine protein kinase
  misc_feature (1)..(223): NCBI GI NO: 15240687 NR Description: serine threonine protein kinase-like protein
  misc_feature (1)..(223): NCBI GI NO: 9280636 NR Description: CBL-interacting protein kinase 2
  misc_feature (1)..(223): NCBI GI NO: 7446373 NR Description: probable serine/threonine protein kinase (EC2
  misc_feature (1)..(221): NCBI GI NO: 8777339 NR Description: serine/threonine protein kinase
  misc_feature (1)..(221): NCBI GI NO: 18424099 NR Description: serine/threonine protein kinase
  misc_feature (1)..(219): NCBI GI NO: 15242509 NR Description: serine threonine protein kinase
  misc_feature (1)..(219): NCBI GI NO: 18420882 NR Description: serine/threonine protein kinase-like protein
MYRKIQNGDFRCPSWFSHKLKKLLYKILDPSPDTRISVQKIKESTWFRKGPVETRTVKEKILSENDTTNAAPAVAMRRKKNVHEDVKPPTVTSLNAFEIISFSTGLDLSGLFIRKECKKETRFTSDKGAVSIISKLEDVAKALNLRVRKKDNGVVKIQGRKVGRKGVLEFDTEIFEITASYHLIEMKQTGGDSLEYKKLLEEDIRPALKDIVWAWHGDDQQQK

SEQ ID NO: 41765 - DNA, 1240 bp, Zea mays subsp. mays
  misc_feature (1)..(1240): Ceres Seq. ID no. 12418860
gcacgagaccattacctagaacatcctaatcaaaaactcttaccgccagccccacatcacggagcatcccccttaataacagcaaactaccacacccatgtccacctccgtctccgccgccgccgttgccgctctcgtcccacccctcaccggccgccggtcgccgccggcatctcgcgtaccgcagatttgccgcagaagaatcagatccaaaccccgtatcttctcttcttccccctccttccccattgtccccgccgctgccatggccaccggcggcgccgcccccaccgcctccgatgccgggtccaagaagaagttgctcatcttcgactccgaggaggatctcgcggtttctcttgcgaagtacactgcggagctgtcggagaagttcgcggccgagaggggtgccttcaccgccgtgctctctggcggatccctcatcgaggcactcaggaagctgacggagccgccgtacctggattcagtggactggagcaagtggcacgtcttctgggtggatgagagggtcgtgcccaaggaccatgtggatagcaactacaagctcgcctatgatgggtttctctccaaggtgccgattcctcctggacaagtttatgctataaacgatgcgttgtcagctgaaggagcggcagacgactacgaagcgtgcctgaagcagcttgtcaagaacggtgtgatttctatgtcagcggcgactggatttcccaggtttgatctccagcttctgggaatgggacctgatggccacattgcgtctctcttccctggccaccctcttgttaacgagaaagagaggtgggtcacatacattaaggattctccaaagccacctccagagagaattacattcacgtttccagtaatcaactcatccgcatacgttgcgatggtggtgactggagctggaaaggcggcagcggtgcagaaggcgctctcagacaagcaaacctcgtcagacctgctgcctgttgagatggctgtgctacaagatggagagttcacctggttcactgataaggcagcggtgtccttgctgcagaacaagtagagtctccatggtaaccttggctcggctcgaagccattttagctcataaaataaaagatccatgggcctgcgtgcatagctgcattcgtcctccaggatttcgtgtaacggagactcgatccttttatgtgtattgttcggagtaatgttcaaaaactctattgtctcc

SEQ ID NO: 41766 - protein, 324 aa, Zea mays subsp. mays
  peptide (1)..(324): Ceres Seq. ID no. 12418861
  misc_feature (88)..(319): Pfam Name: Pfam Description:  Glucosamine-6-phosphate isomerases/ 6-phosphogluconolactonase
  misc_feature (55)..(324): NCBI GI NO: 28140256 NR Description: putative 6-phosphogluconolactonase
  misc_feature (72)..(321): NCBI GI NO: 21554291 NR Description: 6-phosphogluconolactonase-like protein
  misc_feature (72)..(321): NCBI GI NO: 10177901 NR Description: 6-phosphogluconolactonase-like protein
  misc_feature (72)..(321): NCBI GI NO: 18420789 NR Description: 6-phosphogluconolactonase-like protein
  misc_feature (74)..(321): NCBI GI NO: 15229127 NR Description: 6-phosphogluconolactonase - like protein
  misc_feature (71)..(321): NCBI GI NO: 21537412 NR Description: 6-phosphogluconolactonase-like protein
  misc_feature (74)..(321): NCBI GI NO: 21536675 NR Description: 6-phosphogluconolactonase-like protein
  misc_feature (71)..(321): NCBI GI NO: 15238526 NR Description: 6-phosphogluconolactonase-like protein
  misc_feature (71)..(319): NCBI GI NO: 15238523 NR Description: 6-phosphogluconolactonase-like protein
  misc_feature (73)..(321): NCBI GI NO: 14009294 NR Description: putative 6-phosphogluconolactonase
MSTSVSAAAVAALVPPLTGRRSPPASRVPQICRRRIRSKPRIFSSSPSFPIVPAAAMATGGAAPTASDAGSKKKLLIFDSEEDLAVSLAKYTAELSEKFAAERGAFTAVLSGGSLIEALRKLTEPPYLDSVDWSKWHVFWVDERVVPKDHVDSNYKLAYDGFLSKVPIPPGQVYAINDALSAEGAADDYEACLKQLVKNGVISMSAATGFPRFDLQLLGMGPDGHIASLFPGHPLVNEKERWVTYIKDSPKPPPERITFTFPVINSSAYVAMVVTGAGKAAAVQKALSDKQTSSDLLPVEMAVLQDGEFTWFTDKAAVSLLQNK

SEQ ID NO: 41767 - protein, 268 aa, Zea mays subsp. mays
  peptide (1)..(268): Ceres Seq. ID no. 12418862
  misc_feature (32)..(263): Pfam Name: Pfam Description:  Glucosamine-6-phosphate isomerases/ 6-phosphogluconolactonase
  misc_feature (1)..(268): NCBI GI NO: 28140256 NR Description: putative 6-phosphogluconolactonase
  misc_feature (16)..(265): NCBI GI NO: 21554291 NR Description: 6-phosphogluconolactonase-like protein
  misc_feature (16)..(265): NCBI GI NO: 10177901 NR Description: 6-phosphogluconolactonase-like protein
  misc_feature (16)..(265): NCBI GI NO: 18420789 NR Description: 6-phosphogluconolactonase-like protein
  misc_feature (18)..(265): NCBI GI NO: 15229127 NR Description: 6-phosphogluconolactonase - like protein
  misc_feature (15)..(265): NCBI GI NO: 21537412 NR Description: 6-phosphogluconolactonase-like protein
  misc_feature (18)..(265): NCBI GI NO: 21536675 NR Description: 6-phosphogluconolactonase-like protein
  misc_feature (15)..(265): NCBI GI NO: 15238526 NR Description: 6-phosphogluconolactonase-like protein
  misc_feature (15)..(263): NCBI GI NO: 15238523 NR Description: 6-phosphogluconolactonase-like protein
  misc_feature (17)..(265): NCBI GI NO: 14009294 NR Description: putative 6-phosphogluconolactonase
MATGGAAPTASDAGSKKKLLIFDSEEDLAVSLAKYTAELSEKFAAERGAFTAVLSGGSLIEALRKLTEPPYLDSVDWSKWHVFWVDERVVPKDHVDSNYKLAYDGFLSKVPIPPGQVYAINDALSAEGAADDYEACLKQLVKNGVISMSAATGFPRFDLQLLGMGPDGHIASLFPGHPLVNEKERWVTYIKDSPKPPPERITFTFPVINSSAYVAMVVTGAGKAAAVQKALSDKQTSSDLLPVEMAVLQDGEFTWFTDKAAVSLLQNK

SEQ ID NO: 41768 - protein, 174 aa, Zea mays subsp. mays
  peptide (1)..(174): Ceres Seq. ID no. 12418863
ARDHYLEHPNQKLLPPAPHHGASPLITANYHTHVHLRLRRRRCRSRPTPHRPPVAAGISRTADLPQKNQIQTPYLLFFPLLPHCPRRCHGHRRRRPHRLRCRVQEEVAHLRLRGGSRGFSCEVHCGAVGEVRGREGCLHRRALWRIPHRGTQEADGAAVPGFSGLEQVARLLGG

SEQ ID NO: 41769 - DNA, 481 bp, Zea mays subsp. mays
  misc_feature (1)..(481): Ceres Seq. ID no. 2790117
aaggagcgtggggaggaagacttggctagccactagcactaggtgtgagagtttgagtcgtggtggtgtataaagcagtcgtcaagcacaagctcctcctctccctcgtctcgcctgagcagccaagcccatccatcgttccacccacctccgcgatacgatggccgtccctcctgcccgcctcgccgcgtcctcgctcccgctgctcctcgtctggctccagctccagctgctcctcgcgtccgcctgcgaccgctgcgtgcgccactccaaggccgcctactacacctccgcgctcaccctcgcgggcggctcctgtgggtacggcaccgacgccgcctccttgagcgccgggttcctcgccgccgccgccagccccgcgctgtaccgcgccggcgtcggctgcggcgcctgcttccaggtgcggtgcaaggacaagaagctgtgcgccgcggcgggcgccagggtggtggtcacggac

SEQ ID NO: 41770 - protein, 107 aa, Zea mays subsp. mays
  peptide (1)..(107): Ceres Seq. ID no. 2790118
  misc_feature (15)..(106): NCBI GI NO: 20502989 NR Description: Putative pollen allergen
  misc_feature (15)..(106): NCBI GI NO: 21654743 NR Description: expansin-like protein 1 [Oryza sativa]
  misc_feature (8)..(106): NCBI GI NO: 37536544 NR Description: putative pollen allergen
  misc_feature (12)..(106): NCBI GI NO: 15231303 NR Description: putative protein; protein id: At3g45970
  misc_feature (16)..(106): NCBI GI NO: 21555265 NR Description: Expansin-like 1 precursor
  misc_feature (27)..(106): NCBI GI NO: 15233841 NR Description: putative pollen allergen; protein id: At4g38400
  misc_feature (16)..(106): NCBI GI NO: 20138389 NR Description: Expansin-like 3 precursor
  misc_feature (28)..(106): NCBI GI NO: 30038051 NR Description: beta expansin EXPB2.1 [Mirabilis jalapa]
  misc_feature (1)..(106): NCBI GI NO: 34901594 NR Description: P0571D04.11
  misc_feature (27)..(106): NCBI GI NO: 33111959 NR Description: expansin-like protein [Quercus robur]
MAVPPARLAASSLPLLLVWLQLQLLLASACDRCVRHSKAAYYTSALTLAGGSCGYGTDAASLSAGFLAAAASPALYRAGVGCGACFQVRCKDKKLCAAAGARVVVTD

SEQ ID NO: 41771 - DNA, 1342 bp, Zea mays subsp. mays
  misc_feature (1)..(1342): Ceres Seq. ID no. 15180493
gtccttgccatggccatccccaccgcccccgccctcctcttcccctccgttctccctaactcattcccccgccggacaccctggcgacacctcgtccggcggaaaccgcgtcacctccgcgcgggccgcccacgcctgcaggcgccggcgccggctcctcccccggtggcggaggtcgcggcggagcgggacgacacgcctccgctcaggctgctcgagccgccgcaggaggacgaccccttcccgcccgagatggagcccgcggaccctgatttctaccggataggatatgcgcggatgatgcgcgcctatgggatcgagttcctcgaaggccccgacgggatgggcgtctacgcttcccgggacgtggagccacttcgcagagctagagtgattatggagattccgttggagctgatgctgactataactcaaaagaaaccttggatgtttttccctgacattattccactaggccatcctatatttgatgttatcgagtcaacagatccagagacagattgggatctaagattagcatgtcttcttctatatgcatttgatatagaagacaacttttggcagttatattctgattttttgccaagtgctgatgaatgcactagtttgctgctggcaccaaaggaagatctaatggaactagaagatgaagatcttgcttcacaaatgttaaaacaccaggaacgagcaattgacttttggcaaaagcattgggacaaaccaattcctctaaagctgaaacgccttgcacgtgaccatgagagatttctctgggcactgagtatagtacagtctcgttctgtcaacttgaagttgagaatgggagccttcatccaagatgcaaatgtgctagctccttatgctgatatgttgaaccactcacccaatgctaattgcttcctgcattggcgttttaaagatcgtatgcttgaagttatgattaaggctggacaagctatcaagaaaggagacgagatgacgatagattatatgagtggcgtcaacagcaaatttgtggaaagatatgggttctcatcaccaacgaatccttgggagctcataaatttctcgagtcctgcaacaattcacatggattccttcttatcggtcttcaatatcgctggcttgcatgatgagctgtaccacaattctgcattgacctcagtagtagaaaccgactttgtggacggagcagtcgtagcagcagccagagcattgccgacatggtcagatggtgatgttcctgcaattcctagtgtggagagaaaatctgctcaggcactgcaagaggagtgccgccaaatgttggattcattcccaa

SEQ ID NO: 41772 - protein, 447 aa, Zea mays subsp. mays
  peptide (1)..(447): Ceres Seq. ID no. 15180494
  misc_feature (297)..(340): Pfam Name: Pfam Description:  SET domain
  misc_feature (41)..(446): NCBI GI NO: 28393566 NR Description: unknown protein [Arabidopsis thaliana]
  misc_feature (41)..(300): NCBI GI NO: 30684996 NR Description: expressed protein [Arabidopsis thaliana]
  misc_feature (41)..(245): NCBI GI NO: 7485732 NR Description: hypothetical protein F18F4
  misc_feature (297)..(446): NCBI GI NO: 7485733 NR Description: hypothetical protein F18F4
  misc_feature (297)..(446): NCBI GI NO: 30685001 NR Description: expressed protein [Arabidopsis thaliana]
  misc_feature (163)..(300): NCBI GI NO: 7485732 NR Description: hypothetical protein F18F4
VLAMAIPTAPALLFPSVLPNSFPRRTPWRHLVRRKPRHLRAGRPRLQAPAPAPPPVAEVAAERDDTPPLRLLEPPQEDDPFPPEMEPADPDFYRIGYARMMRAYGIEFLEGPDGMGVYASRDVEPLRRARVIMEIPLELMLTITQKKPWMFFPDIIPLGHPIFDVIESTDPETDWDLRLACLLLYAFDIEDNFWQLYSDFLPSADECTSLLLAPKEDLMELEDEDLASQMLKHQERAIDFWQKHWDKPIPLKLKRLARDHERFLWALSIVQSRSVNLKLRMGAFIQDANVLAPYADMLNHSPNANCFLHWRFKDRMLEVMIKAGQAIKKGDEMTIDYMSGVNSKFVERYGFSSPTNPWELINFSSPATIHMDSFLSVFNIAGLHDELYHNSALTSVVETDFVDGAVVAAARALPTWSDGDVPAIPSVERKSAQALQEECRQMLDSFP

SEQ ID NO: 41773 - protein, 444 aa, Zea mays subsp. mays
  peptide (1)..(444): Ceres Seq. ID no. 15180495
  misc_feature (294)..(337): Pfam Name: Pfam Description:  SET domain
  misc_feature (38)..(443): NCBI GI NO: 28393566 NR Description: unknown protein [Arabidopsis thaliana]
  misc_feature (38)..(297): NCBI GI NO: 30684996 NR Description: expressed protein [Arabidopsis thaliana]
  misc_feature (38)..(242): NCBI GI NO: 7485732 NR Description: hypothetical protein F18F4
  misc_feature (294)..(443): NCBI GI NO: 7485733 NR Description: hypothetical protein F18F4
  misc_feature (294)..(443): NCBI GI NO: 30685001 NR Description: expressed protein [Arabidopsis thaliana]
  misc_feature (160)..(297): NCBI GI NO: 7485732 NR Description: hypothetical protein F18F4
MAIPTAPALLFPSVLPNSFPRRTPWRHLVRRKPRHLRAGRPRLQAPAPAPPPVAEVAAERDDTPPLRLLEPPQEDDPFPPEMEPADPDFYRIGYARMMRAYGIEFLEGPDGMGVYASRDVEPLRRARVIMEIPLELMLTITQKKPWMFFPDIIPLGHPIFDVIESTDPETDWDLRLACLLLYAFDIEDNFWQLYSDFLPSADECTSLLLAPKEDLMELEDEDLASQMLKHQERAIDFWQKHWDKPIPLKLKRLARDHERFLWALSIVQSRSVNLKLRMGAFIQDANVLAPYADMLNHSPNANCFLHWRFKDRMLEVMIKAGQAIKKGDEMTIDYMSGVNSKFVERYGFSSPTNPWELINFSSPATIHMDSFLSVFNIAGLHDELYHNSALTSVVETDFVDGAVVAAARALPTWSDGDVPAIPSVERKSAQALQEECRQMLDSFP

SEQ ID NO: 41774 - protein, 363 aa, Zea mays subsp. mays
  peptide (1)..(363): Ceres Seq. ID no. 15180496
  misc_feature (213)..(256): Pfam Name: Pfam Description:  SET domain
  misc_feature (1)..(362): NCBI GI NO: 28393566 NR Description: unknown protein [Arabidopsis thaliana]
  misc_feature (1)..(216): NCBI GI NO: 30684996 NR Description: expressed protein [Arabidopsis thaliana]
  misc_feature (1)..(161): NCBI GI NO: 7485732 NR Description: hypothetical protein F18F4
  misc_feature (213)..(362): NCBI GI NO: 7485733 NR Description: hypothetical protein F18F4
  misc_feature (213)..(362): NCBI GI NO: 30685001 NR Description: expressed protein [Arabidopsis thaliana]
  misc_feature (79)..(216): NCBI GI NO: 7485732 NR Description: hypothetical protein F18F4
MEPADPDFYRIGYARMMRAYGIEFLEGPDGMGVYASRDVEPLRRARVIMEIPLELMLTITQKKPWMFFPDIIPLGHPIFDVIESTDPETDWDLRLACLLLYAFDIEDNFWQLYSDFLPSADECTSLLLAPKEDLMELEDEDLASQMLKHQERAIDFWQKHWDKPIPLKLKRLARDHERFLWALSIVQSRSVNLKLRMGAFIQDANVLAPYADMLNHSPNANCFLHWRFKDRMLEVMIKAGQAIKKGDEMTIDYMSGVNSKFVERYGFSSPTNPWELINFSSPATIHMDSFLSVFNIAGLHDELYHNSALTSVVETDFVDGAVVAAARALPTWSDGDVPAIPSVERKSAQALQEECRQMLDSFP

SEQ ID NO: 41775 - DNA, 1431 bp, Zea mays subsp. mays
  misc_feature (1)..(1431): Ceres Seq. ID no. 12419006
aatgaaggacacaaagaagcccacgcgggcgtcgtctcgcttaggcgggagggtcgtcggcgtggcatccatgcttctcttcgtctcgttggggttcgttctcggcgtgacctcctccaacgccatgttcatccgatactacctccctttcatgccaccgttacgctctagtgctgcgccgtcgtcttcgcctccgccgctgacgacaccactgacaccgtcgcaaacgccgccgccgccgccgccgccgccgctgccacaaaacccgcagctgcggtcggcgggcttcctttccccgagcggcgtcatgcacaacatgaccgacgaggaactgtactggcgagcgtccatggcgccgatggtccgccgcacgccggacagccgcgtgcccaaggtggctttcttgttcctggtcagggggaagctgcctctccggcctctgtgggagaagttcttcgcgggccacgaaggccggtactccatttacgtgcacgcccacccgtcctacaccggctcgccgccgacggactccccgttctacggccgctacatcccgagccagataacgaaatggggcgacgcgagcctggtggaggcggagcggcggctcctggcaaacgcgctcctggacctgggcaacgagcggttcgcgctcttctccgaggcgtgcatcccggtgtacgacttccccaccgtgcacgccttcctgacaggctccgacaccagcttcgtggactgctacgagaacggcggcagccggtcgcgctaccggcccttcttcgccacccgcaacatcacgctggcgcggtggcgcaagggcgcgcagtggttcgagatggaccgcgcgctggcgctggagtccgtcgcggacggctcctgcttcccggcgttccgcgacttctgcgtggggcggagggagtgcctcatcgacgagcactacctgccgacgctggtgagcctgctggggtggggccgccgcaacgccaaccgcacgctcacgtacgcggactggaagcggcccgtcaaccggcacccgcacacccacggcccggacgaggtgacggaggagcggatcagggagatcagggaggaaggcggcaggcggtgcttctacaacggagccaggagaggcatctgcaacctgttcgcgcgcaagttctcgccggacacgctcgagccgctgctccggctggcgcccaaggtcatggggttcgggtgacctgaccagacgatcgaccgaccggagcaggaggcagtgtaccatagcattctactattctttgcgccgtggatgatcgacccaggttgagctgggaatcacaggcagagagtcgactcgagtccaccatcaggctatcaggactcaggaggagaataagctctttcttttgcgaaccatatacacagtgtatcatgaacatcccgtttgtc

SEQ ID NO: 41776 - protein, 405 aa, Zea mays subsp. mays
  peptide (1)..(405): Ceres Seq. ID no. 12419007
  misc_feature (168)..(277): Pfam Name: Pfam Description:  Arabidopsis protein of unknown function, DUF266
  misc_feature (2)..(405): NCBI GI NO: 37531372 NR Description: hypothetical protein
  misc_feature (95)..(405): NCBI GI NO: 34895612 NR Description: OSJNBa0083M16.18
  misc_feature (96)..(405): NCBI GI NO: 34895606 NR Description: OSJNBa0083M16.15
  misc_feature (67)..(404): NCBI GI NO: 15221386 NR Description: hypothetical protein; protein id: At1g68390.1
  misc_feature (96)..(402): NCBI GI NO: 34907318 NR Description: contains ESTsAU096118
  misc_feature (89)..(404): NCBI GI NO: 15239155 NR Description: putative protein; protein id: At5g11730
  misc_feature (62)..(404): NCBI GI NO: 15221384 NR Description: hypothetical protein; protein id: At1g68380.1
  misc_feature (99)..(405): NCBI GI NO: 15218028 NR Description: hypothetical protein; protein id: At1g51770.1
  misc_feature (99)..(404): NCBI GI NO: 18402952 NR Description: expressed protein; protein id: At3g21310
  misc_feature (99)..(404): NCBI GI NO: 21554566 NR Description: unknown [Arabidopsis thaliana]
MKDTKKPTRASSRLGGRVVGVASMLLFVSLGFVLGVTSSNAMFIRYYLPFMPPLRSSAAPSSSPPPLTTPLTPSQTPPPPPPPPLPQNPQLRSAGFLSPSGVMHNMTDEELYWRASMAPMVRRTPDSRVPKVAFLFLVRGKLPLRPLWEKFFAGHEGRYSIYVHAHPSYTGSPPTDSPFYGRYIPSQITKWGDASLVEAERRLLANALLDLGNERFALFSEACIPVYDFPTVHAFLTGSDTSFVDCYENGGSRSRYRPFFATRNITLARWRKGAQWFEMDRALALESVADGSCFPAFRDFCVGRRECLIDEHYLPTLVSLLGWGRRNANRTLTYADWKRPVNRHPHTHGPDEVTEERIREIREEGGRRCFYNGARRGICNLFARKFSPDTLEPLLRLAPKVMGFG

SEQ ID NO: 41777 - protein, 382 aa, Zea mays subsp. mays
  peptide (1)..(382): Ceres Seq. ID no. 12419008
  misc_feature (145)..(254): Pfam Name: Pfam Description:  Arabidopsis protein of unknown function, DUF266
  misc_feature (1)..(382): NCBI GI NO: 37531372 NR Description: hypothetical protein
  misc_feature (72)..(382): NCBI GI NO: 34895612 NR Description: OSJNBa0083M16.18
  misc_feature (73)..(382): NCBI GI NO: 34895606 NR Description: OSJNBa0083M16.15
  misc_feature (44)..(381): NCBI GI NO: 15221386 NR Description: hypothetical protein; protein id: At1g68390.1
  misc_feature (73)..(379): NCBI GI NO: 34907318 NR Description: contains ESTsAU096118
  misc_feature (66)..(381): NCBI GI NO: 15239155 NR Description: putative protein; protein id: At5g11730
  misc_feature (39)..(381): NCBI GI NO: 15221384 NR Description: hypothetical protein; protein id: At1g68380.1
  misc_feature (76)..(382): NCBI GI NO: 15218028 NR Description: hypothetical protein; protein id: At1g51770.1
  misc_feature (76)..(381): NCBI GI NO: 18402952 NR Description: expressed protein; protein id: At3g21310
  misc_feature (76)..(381): NCBI GI NO: 21554566 NR Description: unknown [Arabidopsis thaliana]
MLLFVSLGFVLGVTSSNAMFIRYYLPFMPPLRSSAAPSSSPPPLTTPLTPSQTPPPPPPPPLPQNPQLRSAGFLSPSGVMHNMTDEELYWRASMAPMVRRTPDSRVPKVAFLFLVRGKLPLRPLWEKFFAGHEGRYSIYVHAHPSYTGSPPTDSPFYGRYIPSQITKWGDASLVEAERRLLANALLDLGNERFALFSEACIPVYDFPTVHAFLTGSDTSFVDCYENGGSRSRYRPFFATRNITLARWRKGAQWFEMDRALALESVADGSCFPAFRDFCVGRRECLIDEHYLPTLVSLLGWGRRNANRTLTYADWKRPVNRHPHTHGPDEVTEERIREIREEGGRRCFYNGARRGICNLFARKFSPDTLEPLLRLAPKVMGFG

SEQ ID NO: 41778 - protein, 364 aa, Zea mays subsp. mays
  peptide (1)..(364): Ceres Seq. ID no. 12419009
  misc_feature (127)..(236): Pfam Name: Pfam Description:  Arabidopsis protein of unknown function, DUF266
  misc_feature (1)..(364): NCBI GI NO: 37531372 NR Description: hypothetical protein
  misc_feature (54)..(364): NCBI GI NO: 34895612 NR Description: OSJNBa0083M16.18
  misc_feature (55)..(364): NCBI GI NO: 34895606 NR Description: OSJNBa0083M16.15
  misc_feature (26)..(363): NCBI GI NO: 15221386 NR Description: hypothetical protein; protein id: At1g68390.1
  misc_feature (55)..(361): NCBI GI NO: 34907318 NR Description: contains ESTsAU096118
  misc_feature (48)..(363): NCBI GI NO: 15239155 NR Description: putative protein; protein id: At5g11730
  misc_feature (21)..(363): NCBI GI NO: 15221384 NR Description: hypothetical protein; protein id: At1g68380.1
  misc_feature (58)..(364): NCBI GI NO: 15218028 NR Description: hypothetical protein; protein id: At1g51770.1
  misc_feature (58)..(363): NCBI GI NO: 18402952 NR Description: expressed protein; protein id: At3g21310
  misc_feature (58)..(363): NCBI GI NO: 21554566 NR Description: unknown [Arabidopsis thaliana]
MFIRYYLPFMPPLRSSAAPSSSPPPLTTPLTPSQTPPPPPPPPLPQNPQLRSAGFLSPSGVMHNMTDEELYWRASMAPMVRRTPDSRVPKVAFLFLVRGKLPLRPLWEKFFAGHEGRYSIYVHAHPSYTGSPPTDSPFYGRYIPSQITKWGDASLVEAERRLLANALLDLGNERFALFSEACIPVYDFPTVHAFLTGSDTSFVDCYENGGSRSRYRPFFATRNITLARWRKGAQWFEMDRALALESVADGSCFPAFRDFCVGRRECLIDEHYLPTLVSLLGWGRRNANRTLTYADWKRPVNRHPHTHGPDEVTEERIREIREEGGRRCFYNGARRGICNLFARKFSPDTLEPLLRLAPKVMGFG

SEQ ID NO: 41779 - DNA, 1567 bp, Zea mays subsp. mays
  misc_feature (1)..(1567): Ceres Seq. ID no. 12369608
gcacgagaccattacctagaacatcctaatcgaaaatctttataagcaagaacaagttctgcgaaaacgttactataatacaattgaagatatgaaaggaaaaataagagttttttgtcgcttgcgccctctaagcgacaaggaactttcttttgaggagaaaaatatagtttgcagtcctgatgaatttacaattgcacatccatggaaagatgagaagtcgaagcaacatatatatgatcgtgtttttgatgcaaacacaagtcaagaagaaatatttgaggatactaagtacctggtacaatcagctgttgatggatataacgtttgcatatttgcatatggtcaaactggttctggaaagactttcactatttatggttcagataacaatcctggtcttactccaagggccacatctgaactttttagggtgataaagcgcgatgggaacaaatattcattttcattgaagacatatatggtggagctttatcaagataatcttgtggacctattgttgcccagaaatgtgaagccgctaaagttagagataaaaaaagattccaagggtgttgttactgttgaaaatgcgacagttgtgagcatttcgagtattgaggaactgagggctataatttcaagaggctctgagaggaggcacactgccggaactaatatgaatgatgagagttcaaggtctcatttaattctttcagtcattattgaaagtacaaatcttcaaacccaatcatatgcaagaggcaagctaagttttgtggaccttgctggttctgagagggtgaaaaaatctggttccgcaggaaagcaactgaaagaagcacaaagtataaacaaatctctttctgctttggctgatgttattggtgctttatcttctgatggacaacatataccttaccggaaccataagttaacaatgcttatgagtgattctctgggagggaatgcgaagaccttgatgtttgtgaatgtttcaccagcagagtctaacttggaggagacttacaactcgctgatgtatgcttcacgcgttcgatgcattgttaatgatacgagcaagcatgttgctccaaaagaaatcatgagattgaagaagttgatcgcctactggaaggagcaagcaggcaagcggagtgatgaggacgagctagaggaggtaaaggaagagaggatctcaaaagagagagcagacaatcgcctgactggctgacaacttgacacaaccactgaatgctcctggttccgttcttccattacctggagaagaggtgattgatgctgatgagcatttgcaactgccacgagttctgcgatcgctctctaacagaatgttccgatatcatctgacctgtacatacagtagctacgtattatatactatggcagcgatgcccgtttgtacaaagaggaatgtagcacacattgatagaaagggaaaaggttgtgtgactgggaggcttgatgcgccctaagcctataacagctggatcatgtctttttccccccttggagcaggtatttaaagcataatgtgagcgtcctt

SEQ ID NO: 41780 - protein, 380 aa, Zea mays subsp. mays
  peptide (1)..(380): Ceres Seq. ID no. 12369609
  misc_feature (1)..(379): NCBI GI NO: 10130006 NR Description: kinesin-like calmodulin binding protein [Zea mays]
  misc_feature (1)..(379): NCBI GI NO: 29367597 NR Description: kinesin-like calmodulin-binding protein-likeprotein
  misc_feature (1)..(377): NCBI GI NO: 30983603 NR Description: kinesin-like calmodulin binding protein
  misc_feature (1)..(377): NCBI GI NO: 7489162 NR Description: kinesin-related protein tck1 - common tobacco
  misc_feature (1)..(376): NCBI GI NO: 30698168 NR Description: kinesin-like calmodulin-binding protein
  misc_feature (1)..(376): NCBI GI NO: 30698170 NR Description: kinesin-like calmodulin-binding protein
  misc_feature (1)..(376): NCBI GI NO: 2586157 NR Description: kinesin-like calmodulin-binding protein
  misc_feature (1)..(376): NCBI GI NO: 17380674 NR Description: putative kinesin calmodulin-binding protein
  misc_feature (1)..(377): NCBI GI NO: 7489245 NR Description: kinesin heavy chain-like protein
  misc_feature (1)..(376): NCBI GI NO: 1237102 NR Description: calmodulin-binding protein
MKGKIRVFCRLRPLSDKELSFEEKNIVCSPDEFTIAHPWKDEKSKQHIYDRVFDANTSQEEIFEDTKYLVQSAVDGYNVCIFAYGQTGSGKTFTIYGSDNNPGLTPRATSELFRVIKRDGNKYSFSLKTYMVELYQDNLVDLLLPRNVKPLKLEIKKDSKGVVTVENATVVSISSIEELRAIISRGSERRHTAGTNMNDESSRSHLILSVIIESTNLQTQSYARGKLSFVDLAGSERVKKSGSAGKQLKEAQSINKSLSALADVIGALSSDGQHIPYRNHKLTMLMSDSLGGNAKTLMFVNVSPAESNLEETYNSLMYASRVRCIVNDTSKHVAPKEIMRLKKLIAYWKEQAGKRSDEDELEEVKEERISKERADNRLTG

SEQ ID NO: 41781 - protein, 250 aa, Zea mays subsp. mays
  peptide (1)..(250): Ceres Seq. ID no. 12369610
  misc_feature (1)..(249): NCBI GI NO: 10130006 NR Description: kinesin-like calmodulin binding protein [Zea mays]
  misc_feature (1)..(249): NCBI GI NO: 29367597 NR Description: kinesin-like calmodulin-binding protein-likeprotein
  misc_feature (1)..(247): NCBI GI NO: 30983603 NR Description: kinesin-like calmodulin binding protein
  misc_feature (1)..(247): NCBI GI NO: 7489162 NR Description: kinesin-related protein tck1 - common tobacco
  misc_feature (1)..(246): NCBI GI NO: 30698168 NR Description: kinesin-like calmodulin-binding protein
  misc_feature (1)..(246): NCBI GI NO: 30698170 NR Description: kinesin-like calmodulin-binding protein
  misc_feature (1)..(246): NCBI GI NO: 2586157 NR Description: kinesin-like calmodulin-binding protein
  misc_feature (1)..(246): NCBI GI NO: 17380674 NR Description: putative kinesin calmodulin-binding protein
  misc_feature (1)..(247): NCBI GI NO: 7489245 NR Description: kinesin heavy chain-like protein
  misc_feature (1)..(246): NCBI GI NO: 1237102 NR Description: calmodulin-binding protein
MVELYQDNLVDLLLPRNVKPLKLEIKKDSKGVVTVENATVVSISSIEELRAIISRGSERRHTAGTNMNDESSRSHLILSVIIESTNLQTQSYARGKLSFVDLAGSERVKKSGSAGKQLKEAQSINKSLSALADVIGALSSDGQHIPYRNHKLTMLMSDSLGGNAKTLMFVNVSPAESNLEETYNSLMYASRVRCIVNDTSKHVAPKEIMRLKKLIAYWKEQAGKRSDEDELEEVKEERISKERADNRLTG

SEQ ID NO: 41782 - DNA, 466 bp, Zea mays subsp. mays
  misc_feature (1)..(466): Ceres Seq. ID no. 11028222
aaatgctaatggattgcttaaactggagagtacagaatgagattgacatcgtgttagctaaacccattctgccatctgatatatatagagttattcgggacacgttacttgttggattgacagggtactccaagcagggacaacctgtttatgcatttggtgtgggtcttagtacttttgacaaggcctcggtgaattactatgtgcaatcacacatacagatgaatgaatatcgagatcgtgttgtcctgccggctgcatcaaagaagtttgggagacagattaatacctgcttgaaggttatggatatgactggcctcaagctgtctgcactgagccaaataaagatgttgacgatgattactactgttgatgaccttaattatcctgagaaaacggaaacttattacattgtaaatgctccatatgttttttcagcgtgttggaaggttgtgaagccactctt

SEQ ID NO: 41783 - protein, 154 aa, Zea mays subsp. mays
  peptide (1)..(154): Ceres Seq. ID no. 11028223
  misc_feature (80)..(153): Pfam Name: Pfam Description:  CRAL/TRIO domain
  misc_feature (1)..(153): NCBI GI NO: 7488694 NR Description: phosphatidylinositol-phosphatidylcholine transfer protein SEC14 homolog Ssh1
  misc_feature (1)..(153): NCBI GI NO: 15222786 NR Description: polyphosphoinositide binding protein, putative
  misc_feature (1)..(153): NCBI GI NO: 25295905 NR Description: protein F14J16.8 [imported] - Arabidopsis thaliana
  misc_feature (1)..(153): NCBI GI NO: 15238794 NR Description: putative protein; protein id: At5g47730.1
  misc_feature (1)..(152): NCBI GI NO: 14532536 NR Description: AT5g47730/MCA23_5 [Arabidopsis thaliana]
  misc_feature (1)..(152): NCBI GI NO: 28411929 NR Description: OSJNBa0027N13.10
  misc_feature (1)..(152): NCBI GI NO: 25412048 NR Description: hypothetical protein At2g21540
  misc_feature (1)..(152): NCBI GI NO: 18399733 NR Description: putative phosphatidylinositol phophatidylcholinetransfer protein
  misc_feature (44)..(152): NCBI GI NO: 40741885 NR Description: hypothetical protein AN4997.2
  misc_feature (1)..(153): NCBI GI NO: 4506867 NR Description: SEC14 (S. cerevisiae)-like 1 [Homo sapiens]
MLMDCLNWRVQNEIDIVLAKPILPSDIYRVIRDTLLVGLTGYSKQGQPVYAFGVGLSTFDKASVNYYVQSHIQMNEYRDRVVLPAASKKFGRQINTCLKVMDMTGLKLSALSQIKMLTMITTVDDLNYPEKTETYYIVNAPYVFSACWKVVKPL

SEQ ID NO: 41784 - protein, 152 aa, Zea mays subsp. mays
  peptide (1)..(152): Ceres Seq. ID no. 11028224
  misc_feature (78)..(151): Pfam Name: Pfam Description:  CRAL/TRIO domain
  misc_feature (1)..(151): NCBI GI NO: 7488694 NR Description: phosphatidylinositol-phosphatidylcholine transfer protein SEC14 homolog Ssh1
  misc_feature (1)..(151): NCBI GI NO: 15222786 NR Description: polyphosphoinositide binding protein, putative
  misc_feature (1)..(151): NCBI GI NO: 25295905 NR Description: protein F14J16.8 [imported] - Arabidopsis thaliana
  misc_feature (1)..(151): NCBI GI NO: 15238794 NR Description: putative protein; protein id: At5g47730.1
  misc_feature (1)..(150): NCBI GI NO: 14532536 NR Description: AT5g47730/MCA23_5 [Arabidopsis thaliana]
  misc_feature (1)..(150): NCBI GI NO: 28411929 NR Description: OSJNBa0027N13.10
  misc_feature (1)..(150): NCBI GI NO: 25412048 NR Description: hypothetical protein At2g21540
  misc_feature (1)..(150): NCBI GI NO: 18399733 NR Description: putative phosphatidylinositol phophatidylcholinetransfer protein
  misc_feature (42)..(150): NCBI GI NO: 40741885 NR Description: hypothetical protein AN4997.2
  misc_feature (1)..(151): NCBI GI NO: 4506867 NR Description: SEC14 (S. cerevisiae)-like 1 [Homo sapiens]
MDCLNWRVQNEIDIVLAKPILPSDIYRVIRDTLLVGLTGYSKQGQPVYAFGVGLSTFDKASVNYYVQSHIQMNEYRDRVVLPAASKKFGRQINTCLKVMDMTGLKLSALSQIKMLTMITTVDDLNYPEKTETYYIVNAPYVFSACWKVVKPL

SEQ ID NO: 41785 - protein, 81 aa, Zea mays subsp. mays
  peptide (1)..(81): Ceres Seq. ID no. 11028225
  misc_feature (7)..(80): Pfam Name: Pfam Description:  CRAL/TRIO domain
  misc_feature (1)..(80): NCBI GI NO: 7488694 NR Description: phosphatidylinositol-phosphatidylcholine transfer protein SEC14 homolog Ssh1
  misc_feature (1)..(80): NCBI GI NO: 15222786 NR Description: polyphosphoinositide binding protein, putative
  misc_feature (1)..(80): NCBI GI NO: 25295905 NR Description: protein F14J16.8 [imported] - Arabidopsis thaliana
  misc_feature (1)..(80): NCBI GI NO: 15238794 NR Description: putative protein; protein id: At5g47730.1
  misc_feature (1)..(79): NCBI GI NO: 14532536 NR Description: AT5g47730/MCA23_5 [Arabidopsis thaliana]
  misc_feature (1)..(79): NCBI GI NO: 28411929 NR Description: OSJNBa0027N13.10
  misc_feature (1)..(79): NCBI GI NO: 25412048 NR Description: hypothetical protein At2g21540
  misc_feature (1)..(79): NCBI GI NO: 18399733 NR Description: putative phosphatidylinositol phophatidylcholinetransfer protein
  misc_feature (1)..(79): NCBI GI NO: 40741885 NR Description: hypothetical protein AN4997.2
  misc_feature (1)..(80): NCBI GI NO: 4506867 NR Description: SEC14 (S. cerevisiae)-like 1 [Homo sapiens]
MNEYRDRVVLPAASKKFGRQINTCLKVMDMTGLKLSALSQIKMLTMITTVDDLNYPEKTETYYIVNAPYVFSACWKVVKPL

SEQ ID NO: 41786 - DNA, 1596 bp, Zea mays subsp. mays
  misc_feature (1)..(1596): Ceres Seq. ID no. 12381657
gcacgagaccattacctagaacatcctaatcgaaaagatgagagagatctttgatgcactgaagttgttaaggatcgtggttgacatcccgttctggaaaaagaatctctgtagagaagtgtagcttcagccgctttgatgactagttcaagaaggatgtcacggggtttcacaatgcaagcggcagccgcaagtggcctactggagcttgtgtgcttcggactggcttgaggaattccgaatcaaaggggccccggcgacggctagcgtgctgcgtgccatgacgagtcgatgaggtcccagttgttgattggccttggatgacgacgttgggcaactggcacggtgatggatgcgtccatgactgcaatgagcactgaatggaggtgataacatctatggtgctgattcaactgatgcagccaagtctatggatgcagcaattgctccagccattgacatgaaactgccttgggctgctgtgatcgggaaccatgaccaagagggtacgctatcgcgtgagggtgtgatgcgtcaccttgtgggcatgaaaaacacccttgcaagcttcaatccggaaggaattgaaattgatggttacggaaattacaatttggaagtttccggggttgaagggacatccatggatgaaaaatcagtgctcaacctgtatttcctggacagcggtgactattccactgtgccgtcaatcaatggttatggttggatcaaggcttcacagcaagtctggttccaacaaacatcttcaagtctacaggcaaagtatatgaataagaacccgaaacagaaggaaccagcacctggccttgtgttcttccacattccactaccagagttcagcagttttacggcatccaatttcacaggagtaaagcaggagggtatcagctcagcatcaattaactctgggttctttgcctccatggtggaggctggagatgtgagagctgcctttgtgggacatgatcacattaatgacttctgtgggaagctcagtggtattcagctctgctatgctggtggatttggttaccatgcctatgggaaagctgggtggtcaagaagagcgagggtactgtctgtgcaacttgagaaaacagacagcggtgaatggcgaggtgtcaagtccatcaagacatggaagaggcttgatgataaacatctgagcacaattgactctgaggttctctggaacagaggctctaatgggaggcgcaggaaaaatcctgatggtagttaacttttgatgcagacaggaatggtgctccataagggatctctacatcggtgtgtattgttggatggccagtttactatagaatcagaaatgcagaagtgtgtacatgggggagaaggtctatacagacacatacacgcaggtttctgctgttgcatttttccatgttattagaaaataagtaatcaaaattcagtgccgttgtcaattattgcaggtggtctcatagactagtatatagtgtggtcaaaggaaaacgagaatgcaatgtcattgtagtccatctctcgtgtattgttaaactcggtcggaaagggaaaaactgttctcccggtatt

SEQ ID NO: 41787 - protein, 276 aa, Zea mays subsp. mays
  peptide (1)..(276): Ceres Seq. ID no. 12381658
  misc_feature (1)..(189): Pfam Name: Pfam Description:  Calcineurin-like phosphoesterase
  misc_feature (1)..(275): NCBI GI NO: 7208777 NR Description: putative PTS protein [Cicer arietinum]
  misc_feature (1)..(266): NCBI GI NO: 15242654 NR Description: putative protein; protein id: At5g63140.1
  misc_feature (1)..(266): NCBI GI NO: 25763519 NR Description: probable phosphoesterase (EC 3
  misc_feature (1)..(265): NCBI GI NO: 15226455 NR Description: hypothetical protein; protein id: At2g46880.1
  misc_feature (1)..(265): NCBI GI NO: 30267807 NR Description: hypothetical protein [Arabidopsis thaliana]
  misc_feature (1)..(261): NCBI GI NO: 15242042 NR Description: putative protein; protein id: At5g57140.1
  misc_feature (1)..(207): NCBI GI NO: 30267809 NR Description: hypothetical protein [Arabidopsis thaliana]
  misc_feature (1)..(249): NCBI GI NO: 40740622 NR Description: hypothetical protein AN3604.2
  misc_feature (1)..(223): NCBI GI NO: 15896061 NR Description: Predicted phosphohydrolase, Icc family
  misc_feature (1)..(265): NCBI GI NO: 6323393 NR Description: Dose-Dependent Cell cycle Regulator; Dcr2p
MDAAIAPAIDMKLPWAAVIGNHDQEGTLSREGVMRHLVGMKNTLASFNPEGIEIDGYGNYNLEVSGVEGTSMDEKSVLNLYFLDSGDYSTVPSINGYGWIKASQQVWFQQTSSSLQAKYMNKNPKQKEPAPGLVFFHIPLPEFSSFTASNFTGVKQEGISSASINSGFFASMVEAGDVRAAFVGHDHINDFCGKLSGIQLCYAGGFGYHAYGKAGWSRRARVLSVQLEKTDSGEWRGVKSIKTWKRLDDKHLSTIDSEVLWNRGSNGRRRKNPDGS

SEQ ID NO: 41788 - protein, 266 aa, Zea mays subsp. mays
  peptide (1)..(266): Ceres Seq. ID no. 12381659
  misc_feature (1)..(179): Pfam Name: Pfam Description:  Calcineurin-like phosphoesterase
  misc_feature (1)..(265): NCBI GI NO: 7208777 NR Description: putative PTS protein [Cicer arietinum]
  misc_feature (1)..(256): NCBI GI NO: 15242654 NR Description: putative protein; protein id: At5g63140.1
  misc_feature (1)..(256): NCBI GI NO: 25763519 NR Description: probable phosphoesterase (EC 3
  misc_feature (1)..(255): NCBI GI NO: 15226455 NR Description: hypothetical protein; protein id: At2g46880.1
  misc_feature (1)..(255): NCBI GI NO: 30267807 NR Description: hypothetical protein [Arabidopsis thaliana]
  misc_feature (1)..(251): NCBI GI NO: 15242042 NR Description: putative protein; protein id: At5g57140.1
  misc_feature (1)..(197): NCBI GI NO: 30267809 NR Description: hypothetical protein [Arabidopsis thaliana]
  misc_feature (1)..(239): NCBI GI NO: 40740622 NR Description: hypothetical protein AN3604.2
  misc_feature (1)..(213): NCBI GI NO: 15896061 NR Description: Predicted phosphohydrolase, Icc family
  misc_feature (1)..(255): NCBI GI NO: 6323393 NR Description: Dose-Dependent Cell cycle Regulator; Dcr2p
MKLPWAAVIGNHDQEGTLSREGVMRHLVGMKNTLASFNPEGIEIDGYGNYNLEVSGVEGTSMDEKSVLNLYFLDSGDYSTVPSINGYGWIKASQQVWFQQTSSSLQAKYMNKNPKQKEPAPGLVFFHIPLPEFSSFTASNFTGVKQEGISSASINSGFFASMVEAGDVRAAFVGHDHINDFCGKLSGIQLCYAGGFGYHAYGKAGWSRRARVLSVQLEKTDSGEWRGVKSIKTWKRLDDKHLSTIDSEVLWNRGSNGRRRKNPDGS

SEQ ID NO: 41789 - protein, 243 aa, Zea mays subsp. mays
  peptide (1)..(243): Ceres Seq. ID no. 12381660
  misc_feature (1)..(156): Pfam Name: Pfam Description:  Calcineurin-like phosphoesterase
  misc_feature (1)..(242): NCBI GI NO: 7208777 NR Description: putative PTS protein [Cicer arietinum]
  misc_feature (1)..(233): NCBI GI NO: 15242654 NR Description: putative protein; protein id: At5g63140.1
  misc_feature (1)..(233): NCBI GI NO: 25763519 NR Description: probable phosphoesterase (EC 3
  misc_feature (1)..(232): NCBI GI NO: 15226455 NR Description: hypothetical protein; protein id: At2g46880.1
  misc_feature (1)..(232): NCBI GI NO: 30267807 NR Description: hypothetical protein [Arabidopsis thaliana]
  misc_feature (1)..(228): NCBI GI NO: 15242042 NR Description: putative protein; protein id: At5g57140.1
  misc_feature (1)..(174): NCBI GI NO: 30267809 NR Description: hypothetical protein [Arabidopsis thaliana]
  misc_feature (1)..(216): NCBI GI NO: 40740622 NR Description: hypothetical protein AN3604.2
  misc_feature (1)..(190): NCBI GI NO: 15896061 NR Description: Predicted phosphohydrolase, Icc family
  misc_feature (1)..(232): NCBI GI NO: 6323393 NR Description: Dose-Dependent Cell cycle Regulator; Dcr2p
MRHLVGMKNTLASFNPEGIEIDGYGNYNLEVSGVEGTSMDEKSVLNLYFLDSGDYSTVPSINGYGWIKASQQVWFQQTSSSLQAKYMNKNPKQKEPAPGLVFFHIPLPEFSSFTASNFTGVKQEGISSASINSGFFASMVEAGDVRAAFVGHDHINDFCGKLSGIQLCYAGGFGYHAYGKAGWSRRARVLSVQLEKTDSGEWRGVKSIKTWKRLDDKHLSTIDSEVLWNRGSNGRRRKNPDGS

SEQ ID NO: 41790 - DNA, 1213 bp, Zea mays subsp. mays
  misc_feature (1)..(1213): Ceres Seq. ID no. 12418105
  misc_feature (618)..(618): n is a, c, t, g, unknown, or other
  misc_feature (531)..(531): n is a, c, t, g, unknown, or other
  misc_feature (779)..(779): n is a, c, t, g, unknown, or other
  misc_feature (544)..(544): n is a, c, t, g, unknown, or other
  misc_feature (496)..(496): n is a, c, t, g, unknown, or other
  misc_feature (477)..(477): n is a, c, t, g, unknown, or other
gacagcctccgcgcgccgcgtcgtcgtcactgtgcagagctagctgctgcaggtttgaaagcgatggccgcgctctacgccctcgtcgcggtctcgctgctgcccgttctcgtcacggcggagtgcgactgctcggacgacgacgccacgggccgcgacaaggcgggagcgctgcggctaaagatcatcgccatcttctgcatcctggcggggggcgcggccggcgcggcggtgccggcgctggggcgcaggctccccgcgctgcgcccgggcgcgggcccgttcctcgccgtcagggccttcgcgggcggcgtcatcctcgccacggggctggtgcacatcctgcccgcggccttcgacgcgctgggctcgccgtgcctcgcggcggccggcgggccgtgggccaggttcccgttcgccgggacggtcgccatcctcgccgcggtcgccacgctcgtggtggacacggtcgccacngggtacctgcgccggaagnccgcggcggtcggcgacgagccaccgcagctcggnggggacgaccccnaggaggcctccggcggcgggcgccacggccacgcgcacggtgtcgacgacgacgacgacctcgtacgccaccgngtcgtctctcaggtgctggagctgggcgtggtggtgcactcgctgatcatcggcatgtcccctgggcgcctcgggatttccccagcacggtgcgcccgctcgtcccggcgttgacgttccaccagctcttcgagggcatcggcctcggcgggtgcatcgtncaggccaaatttcgcctcaggtcaatggtggcgatggcagtcttcttctccctgacgaccccgatcggcgtggccatcggcatcgggatatcgtcggcgtacgacgagacgagccagacggcgctggtcgtgcagggcctgttcgaggccgcggccgcggggatcctggtgtacatggcgctcgtcgacatcctccgcgaggacttcatgagcgcccgggtgcagggcagcgcgcccctgcaggccgcgctgagcgcctcgctgctgctgggagctggcttgatgtccatgctcgccatctgggcatgagtgaccagaacgtgagctggcttgatgcgcagggagtgaattgtagtagtttcgttaggttcgtgttacagtgggtcagccgcttgcccgcttttgagtgtatagaagaggaggggtttgttttg

SEQ ID NO: 41791 - protein, 361 aa, Zea mays subsp. mays
  peptide (1)..(361): Ceres Seq. ID no. 12418106
  misc_feature (233)..(358): Pfam Name: Pfam Description:  ZIP Zinc transporter
  misc_feature (231)..(361): NCBI GI NO: 30841912 NR Description: putative zinc transporter OsZIP2 [Oryza sativa]
  misc_feature (233)..(361): NCBI GI NO: 32816615 NR Description: putative zinc transporter
  misc_feature (233)..(361): NCBI GI NO: 40888854 NR Description: TPA: putative ZIP-like protein
  misc_feature (233)..(361): NCBI GI NO: 32966053 NR Description: iron transporter Fe2
  misc_feature (233)..(361): NCBI GI NO: 34900456 NR Description: putative zinc transporter protein ZIP1
  misc_feature (233)..(361): NCBI GI NO: 40888860 NR Description: TPA: putative ZIP-like protein
  misc_feature (233)..(361): NCBI GI NO: 15418778 NR Description: zinc transporter protein ZIP1 [Glycine max]
  misc_feature (233)..(361): NCBI GI NO: 32492894 NR Description: zinc transporter ZIP3
  misc_feature (233)..(361): NCBI GI NO: 30682009 NR Description: metal transporter, putative (ZIP4)
  misc_feature (233)..(361): NCBI GI NO: 12006851 NR Description: putative Zn transport protein
  misc_feature (159)..(159): Xaa is any aa, unknown or other
  misc_feature (165)..(165): Xaa is any aa, unknown or other
  misc_feature (177)..(177): Xaa is any aa, unknown or other
  misc_feature (181)..(181): Xaa is any aa, unknown or other
  misc_feature (206)..(206): Xaa is any aa, unknown or other
  misc_feature (259)..(259): Xaa is any aa, unknown or other
QPPRAASSSLCRASCCRFESDGRALRPRRGLAAARSRHGGVRLLGRRRHGPRQGGSAAAKDHRHLLHPGGGRGRRGGAGAGAQAPRAAPGRGPVPRRQGLRGRRHPRHGAGAHPARGLRRAGLAVPRGGRRAVGQVPVRRDGRHPRRGRHARGGHGRHXVPAPEXRGGRRRATAARXGRPXGGLRRRAPRPRARCRRRRRPRTPPXRLSGAGAGRGGALADHRHVPWAPRDFPSTVRPLVPALTFHQLFEGIGLGGCIXQAKFRLRSMVAMAVFFSLTTPIGVAIGIGISSAYDETSQTALVVQGLFEAAAAGILVYMALVDILREDFMSARVQGSAPLQAALSASLLLGAGLMSMLAIWA

SEQ ID NO: 41792 - protein, 243 aa, Zea mays subsp. mays
  peptide (1)..(243): Ceres Seq. ID no. 12418107
  misc_feature (60)..(228): Pfam Name: Pfam Description:  ZIP Zinc transporter
  misc_feature (14)..(228): NCBI GI NO: 30841912 NR Description: putative zinc transporter OsZIP2 [Oryza sativa]
  misc_feature (44)..(194): NCBI GI NO: 32816615 NR Description: putative zinc transporter
  misc_feature (190)..(228): NCBI GI NO: 32816615 NR Description: putative zinc transporter
  misc_feature (44)..(194): NCBI GI NO: 40888854 NR Description: TPA: putative ZIP-like protein
  misc_feature (190)..(228): NCBI GI NO: 40888854 NR Description: TPA: putative ZIP-like protein
  misc_feature (44)..(228): NCBI GI NO: 32966053 NR Description: iron transporter Fe2
  misc_feature (44)..(228): NCBI GI NO: 34900456 NR Description: putative zinc transporter protein ZIP1
  misc_feature (20)..(194): NCBI GI NO: 40888860 NR Description: TPA: putative ZIP-like protein
  misc_feature (185)..(228): NCBI GI NO: 40888860 NR Description: TPA: putative ZIP-like protein
  misc_feature (28)..(228): NCBI GI NO: 15418778 NR Description: zinc transporter protein ZIP1 [Glycine max]
  misc_feature (159)..(159): Xaa is any aa, unknown or other
  misc_feature (166)..(166): Xaa is any aa, unknown or other
  misc_feature (177)..(177): Xaa is any aa, unknown or other
  misc_feature (182)..(182): Xaa is any aa, unknown or other
  misc_feature (206)..(206): Xaa is any aa, unknown or other
DSLRAPRRRHCAELAAAGLKAMAALYALVAVSLLPVLVTAECDCSDDDATGRDKAGALRLKIIAIFCILAGGAAGAAVPALGRRLPALRPGAGPFLAVRAFAGGVILATGLVHILPAAFDALGSPCLAAAGGPWARFPFAGTVAILAAVATLVVDTVAXGYLRRKXAAVGDEPPQLXGDDPXEASGGGRHGHAHGVDDDDDLVRHXVVSQVLELGVVVHSLIIGMSPGRLGISPARCARSSRR

SEQ ID NO: 41793 - protein, 222 aa, Zea mays subsp. mays
  peptide (1)..(222): Ceres Seq. ID no. 12418108
  misc_feature (39)..(207): Pfam Name: Pfam Description:  ZIP Zinc transporter
  misc_feature (1)..(207): NCBI GI NO: 30841912 NR Description: putative zinc transporter OsZIP2 [Oryza sativa]
  misc_feature (23)..(173): NCBI GI NO: 32816615 NR Description: putative zinc transporter
  misc_feature (169)..(207): NCBI GI NO: 32816615 NR Description: putative zinc transporter
  misc_feature (23)..(173): NCBI GI NO: 40888854 NR Description: TPA: putative ZIP-like protein
  misc_feature (169)..(207): NCBI GI NO: 40888854 NR Description: TPA: putative ZIP-like protein
  misc_feature (23)..(207): NCBI GI NO: 32966053 NR Description: iron transporter Fe2
  misc_feature (23)..(207): NCBI GI NO: 34900456 NR Description: putative zinc transporter protein ZIP1
  misc_feature (1)..(173): NCBI GI NO: 40888860 NR Description: TPA: putative ZIP-like protein
  misc_feature (164)..(207): NCBI GI NO: 40888860 NR Description: TPA: putative ZIP-like protein
  misc_feature (7)..(207): NCBI GI NO: 15418778 NR Description: zinc transporter protein ZIP1 [Glycine max]
  misc_feature (138)..(138): Xaa is any aa, unknown or other
  misc_feature (145)..(145): Xaa is any aa, unknown or other
  misc_feature (156)..(156): Xaa is any aa, unknown or other
  misc_feature (161)..(161): Xaa is any aa, unknown or other
  misc_feature (185)..(185): Xaa is any aa, unknown or other
MAALYALVAVSLLPVLVTAECDCSDDDATGRDKAGALRLKIIAIFCILAGGAAGAAVPALGRRLPALRPGAGPFLAVRAFAGGVILATGLVHILPAAFDALGSPCLAAAGGPWARFPFAGTVAILAAVATLVVDTVAXGYLRRKXAAVGDEPPQLXGDDPXEASGGGRHGHAHGVDDDDDLVRHXVVSQVLELGVVVHSLIIGMSPGRLGISPARCARSSRR

SEQ ID NO: 41794 - DNA, 1404 bp, Zea mays subsp. mays
  misc_feature (1)..(1404): Ceres Seq. ID no. 12418555
gcacgagaccattacctagaacatcctaatcgaaaaacgcttttgcagctcgctcacccaagtcccaagcgcaggaggccgcggtagcgtcgacttcctgaacgatctggcggcggccgcggctcccaagttcacgaagcgggaggcgcaagcgaagcggctacctctcgccggagatgccgctggggacctctccagcggtggcggaggccgaggcatggacgtgggagaacgcagcggctggagctgccgccgggttcgccacggttgcggccctccacccgctcgacgtcgtccgcacccgcttccaagtgagcggcgggagggggtggtctgaggtgcctccgtacaggaacaccgcgcacgctgtgtacaccatcacacgatctgagggcctgagaggactttatgcaggattttatcccgcagttcttggatcaactgtttcctggggcctatatttctttttctataacagagctaaacaaaggtacttacagaggaagaatgaccagcttcatccagtccatcatctcatctcagctgcagaagcaggtgctttggtttccttgtttacaaatcccatatggctggtgaaaacaagactgcaactacaaacagctaaacaccatacttctcagtattctggtttttctgatctttgaaaactattctaagagaggagggatttcttgcactttataggggaattggacctgggcttttgctggtcacccatggtgcaatacagttcacggcctatgaggaacttcgcaaagctatgatattctttaaaagtgcacaatcaagggcagacgacacaggaggcggggagtcattgctgaattccgtcgattttgcggcacttggggctggttcaaaagtagctgctattctacttacttatccttaccaggtcatcagagcccgcttgcagcaacggcctggcactgatggtactccaaagtactcaaatagctggcatgtagtgaaggaaactgcaaagtatgaaggcgtccgtggattttacaggggcatcacgtccaatctactgaaaaaccttccagctgcgtccctcacgttcgtggtgtatgaaaatgttatcaaactattcaaagcaaccaaggagaagacgtagctactcattaaatccaggagtactgtgcatggtctgacatttctgagttcaaacgatgcctataatttccattccacgtcaagcccatattttatccatttaacatcgtatatgacaaatatgtaacagtacaggttgtgaccaacctgggtcgtggaaattttttgtacttgcattttgtagagagaaaatacacattttgtttcttcccaaagaaatatgtctttgttatataatccagccgggacgctggcgttgtagatctt

SEQ ID NO: 41795 - protein, 162 aa, Zea mays subsp. mays
  peptide (1)..(162): Ceres Seq. ID no. 12418556
  misc_feature (12)..(161): NCBI GI NO: 21537040 NR Description: contains similarity to peroxisomal membrane carrierprotein
  misc_feature (12)..(161): NCBI GI NO: 18425065 NR Description: mitochondrial carrier protein family
  misc_feature (12)..(147): NCBI GI NO: 10177519 NR Description: contains similarity to peroxisomal membrane carrierprotein~gene_id:K1F13
  misc_feature (4)..(162): NCBI GI NO: 27369517 NR Description: RIKEN cDNA 2610043O12 [Mus musculus]
  misc_feature (4)..(162): NCBI GI NO: 34222668 NR Description: Mitochondrial folate transporter/carrier
  misc_feature (17)..(162): NCBI GI NO: 14042724 NR Description: unnamed protein product [Homo sapiens]
  misc_feature (17)..(162): NCBI GI NO: 34866087 NR Description: similar to mitochondrial folate transporter/carrier
  misc_feature (17)..(162): NCBI GI NO: 21314739 NR Description: mitochondrial folate transporter/carrier
  misc_feature (17)..(162): NCBI GI NO: 34222684 NR Description: Mitochondrial folate transporter/carrier
  misc_feature (17)..(162): NCBI GI NO: 28856134 NR Description: Similar to RIKEN cDNA 2610043O12 gene
MPLGTSPAVAEAEAWTWENAAAGAAAGFATVAALHPLDVVRTRFQVSGGRGWSEVPPYRNTAHAVYTITRSEGLRGLYAGFYPAVLGSTVSWGLYFFFYNRAKQRYLQRKNDQLHPVHHLISAAEAGALVSLFTNPIWLVKTRLQLQTAKHHTSQYSGFSDL

SEQ ID NO: 41796 - protein, 118 aa, Zea mays subsp. mays
  peptide (1)..(118): Ceres Seq. ID no. 12418557
  misc_feature (1)..(112): NCBI GI NO: 21537040 NR Description: contains similarity to peroxisomal membrane carrierprotein
  misc_feature (1)..(112): NCBI GI NO: 18425065 NR Description: mitochondrial carrier protein family
  misc_feature (1)..(112): NCBI GI NO: 10177519 NR Description: contains similarity to peroxisomal membrane carrierprotein~gene_id:K1F13
  misc_feature (1)..(117): NCBI GI NO: 27369517 NR Description: RIKEN cDNA 2610043O12 [Mus musculus]
  misc_feature (1)..(117): NCBI GI NO: 34222668 NR Description: Mitochondrial folate transporter/carrier
  misc_feature (1)..(117): NCBI GI NO: 14042724 NR Description: unnamed protein product [Homo sapiens]
  misc_feature (1)..(117): NCBI GI NO: 34866087 NR Description: similar to mitochondrial folate transporter/carrier
  misc_feature (1)..(117): NCBI GI NO: 21314739 NR Description: mitochondrial folate transporter/carrier
  misc_feature (1)..(117): NCBI GI NO: 34222684 NR Description: Mitochondrial folate transporter/carrier
  misc_feature (1)..(110): NCBI GI NO: 28856134 NR Description: Similar to RIKEN cDNA 2610043O12 gene
MIFFKSAQSRADDTGGGESLLNSVDFAALGAGSKVAAILLTYPYQVIRARLQQRPGTDGTPKYSNSWHVVKETAKYEGVRGFYRGITSNLLKNLPAASLTFVVYENVIKLFKATKEKT

SEQ ID NO: 41797 - DNA, 453 bp, Zea mays subsp. mays
  misc_feature (1)..(453): Ceres Seq. ID no. 2733380
atcgaacgatttgggggaggaggtgttctattacacaaaagaggcaaaaaacaaaagccgatcgcggcactcgccgccgttgaggaggaggtttccggcgctgcttccagcgccttgccgtcagcaccatgaggaagaagctggacacgcgtttccccgctcctcggattaaaaagatcatgcaaacagatgaagacgtcggcaagattgctcaagctgtacctgttctagtgtccaaagcattggagctatttctgcaagatttatgtgataggacatatgatattacaattcggaagggggtcaagactgtgggttcttcccatttgaaacaatgcatacaaacgtacaacgtctatgacttcttgagggaagtagtcagcaaagttccagacattggtccttctgatgttattgctgatgataagcttggcaaaaggaggaaagccgaag

SEQ ID NO: 41798 - protein, 108 aa, Zea mays subsp. mays
  peptide (1)..(108): Ceres Seq. ID no. 2733381
  misc_feature (7)..(71): Pfam Name: CBF/NF-Y Pfam Description: Histone-like transcription factor
  misc_feature (1)..(106): NCBI GI NO: 30682195 NR Description: transcription factor Hap5a, putative
  misc_feature (1)..(107): NCBI GI NO: 18481624 NR Description: repressor protein [Oryza sativa]
  misc_feature (1)..(107): NCBI GI NO: 18481626 NR Description: repressor protein [Zea mays]
  misc_feature (1)..(106): NCBI GI NO: 12321975 NR Description: unknown protein; 69004-67516
  misc_feature (2)..(106): NCBI GI NO: 28279647 NR Description: Similar to Dr1 associated protein 1
  misc_feature (2)..(105): NCBI GI NO: 21313424 NR Description: RIKEN cDNA 2310074H19 [Mus musculus]
  misc_feature (2)..(105): NCBI GI NO: 18426973 NR Description: DR1-associated protein 1
  misc_feature (2)..(105): NCBI GI NO: 27661225 NR Description: similar to RIKEN cDNA 2310074H19
  misc_feature (30)..(106): NCBI GI NO: 15239766 NR Description: putative protein; protein id: At5g19490.1
  misc_feature (2)..(101): NCBI GI NO: 10242351 NR Description: NC2alpha [Drosophila melanogaster]
MRKKLDTRFPAPRIKKIMQTDEDVGKIAQAVPVLVSKALELFLQDLCDRTYDITIRKGVKTVGSSHLKQCIQTYNVYDFLREVVSKVPDIGPSDVIADDKLGKRRKAE

SEQ ID NO: 41799 - protein, 91 aa, Zea mays subsp. mays
  peptide (1)..(91): Ceres Seq. ID no. 2733382
  misc_feature (1)..(54): Pfam Name: CBF/NF-Y Pfam Description: Histone-like transcription factor
  misc_feature (1)..(89): NCBI GI NO: 30682195 NR Description: transcription factor Hap5a, putative
  misc_feature (1)..(90): NCBI GI NO: 18481624 NR Description: repressor protein [Oryza sativa]
  misc_feature (1)..(90): NCBI GI NO: 18481626 NR Description: repressor protein [Zea mays]
  misc_feature (1)..(89): NCBI GI NO: 12321975 NR Description: unknown protein; 69004-67516
  misc_feature (1)..(89): NCBI GI NO: 28279647 NR Description: Similar to Dr1 associated protein 1
  misc_feature (1)..(88): NCBI GI NO: 21313424 NR Description: RIKEN cDNA 2310074H19 [Mus musculus]
  misc_feature (1)..(88): NCBI GI NO: 18426973 NR Description: DR1-associated protein 1
  misc_feature (1)..(88): NCBI GI NO: 27661225 NR Description: similar to RIKEN cDNA 2310074H19
  misc_feature (13)..(89): NCBI GI NO: 15239766 NR Description: putative protein; protein id: At5g19490.1
  misc_feature (1)..(84): NCBI GI NO: 10242351 NR Description: NC2alpha [Drosophila melanogaster]
MQTDEDVGKIAQAVPVLVSKALELFLQDLCDRTYDITIRKGVKTVGSSHLKQCIQTYNVYDFLREVVSKVPDIGPSDVIADDKLGKRRKAE

SEQ ID NO: 41800 - protein, 56 aa, Zea mays subsp. mays
  peptide (1)..(56): Ceres Seq. ID no. 2733383
SNDLGEEVFYYTKEAKNKSRSRHSPPLRRRFPALLPAPCRQHHEEEAGHAFPRSSD

SEQ ID NO: 41801 - DNA, 481 bp, Zea mays subsp. mays
  misc_feature (1)..(481): Ceres Seq. ID no. 2733452
ataaataagtaaatacaccatggaatgcgtcgtcgtgccggcctcgcctcgttatgctctgccgcctcctctgcctctgcctctgcccagatccacaggttgaccttcgcgacaggcacgcgttggtggacatcttctcgtcgcacaggttcgaggctgtcattcactttgctgggctcaaggctgttggggagagcgtgcacaagcccctgctttactacgacaacaacctggtcggcaccatcaccctcctggaggtgatggctgcgaatggctgcaagaagctggtgttctcgtcatctgcaactgtctatgggtggcccaaggaagtaccatgcaccgaagaattcccgctctgcgccaccaatccctatgggcggacaaagcttgtgattgaagacatctgccgcgacgtccaccgctccgacccggactggaagatcatactgctcaggtacttcaaccccgttggcgctcatcc

SEQ ID NO: 41802 - protein, 142 aa, Zea mays subsp. mays
  peptide (1)..(142): Ceres Seq. ID no. 2733453
  misc_feature (15)..(141): Pfam Name: Pfam Description:  NAD dependent epimerase/dehydratase family
  misc_feature (15)..(141): NCBI GI NO: 32130594 NR Description: UDP-glucose-4-epimerase [Zea mays]
  misc_feature (15)..(141): NCBI GI NO: 21715990 NR Description: UDP-glucose 4-epimerase
  misc_feature (15)..(141): NCBI GI NO: 21536846 NR Description: UDPglucose 4-epimerase-like protein
  misc_feature (15)..(141): NCBI GI NO: 15236663 NR Description: UDPglucose 4-epimerase - like protein
  misc_feature (15)..(141): NCBI GI NO: 12643850 NR Description: Probable UDP-glucose 4-epimerase At4g10960
  misc_feature (15)..(141): NCBI GI NO: 21553659 NR Description: UDP-galactose 4-epimerase-like protein
  misc_feature (15)..(141): NCBI GI NO: 15236988 NR Description: UDP-galactose 4-epimerase - like protein
  misc_feature (15)..(141): NCBI GI NO: 11386775 NR Description: UDP-glucose 4-epimerase GEPI48
  misc_feature (15)..(141): NCBI GI NO: 15217653 NR Description: UDP-galactose 4-epimerase, putative
  misc_feature (16)..(141): NCBI GI NO: 6633809 NR Description: F1N19.2 [Arabidopsis thaliana]
MLCRLLCLCLCPDPQVDLRDRHALVDIFSSHRFEAVIHFAGLKAVGESVHKPLLYYDNNLVGTITLLEVMAANGCKKLVFSSSATVYGWPKEVPCTEEFPLCATNPYGRTKLVIEDICRDVHRSDPDWKIILLRYFNPVGAH

SEQ ID NO: 41803 - protein, 78 aa, Zea mays subsp. mays
  peptide (1)..(78): Ceres Seq. ID no. 2733454
MRRRAGLASLCSAASSASASAQIHRLTFATGTRWWTSSRRTGSRLSFTLLGSRLLGRACTSPCFTTTTTWSAPSPSWR

SEQ ID NO: 41804 - protein, 73 aa, Zea mays subsp. mays
  peptide (1)..(73): Ceres Seq. ID no. 2733455
  misc_feature (1)..(72): Pfam Name: Pfam Description:  NAD dependent epimerase/dehydratase family
  misc_feature (1)..(72): NCBI GI NO: 32130594 NR Description: UDP-glucose-4-epimerase [Zea mays]
  misc_feature (1)..(72): NCBI GI NO: 21715990 NR Description: UDP-glucose 4-epimerase
  misc_feature (1)..(72): NCBI GI NO: 21536846 NR Description: UDPglucose 4-epimerase-like protein
  misc_feature (1)..(72): NCBI GI NO: 15236663 NR Description: UDPglucose 4-epimerase - like protein
  misc_feature (1)..(72): NCBI GI NO: 12643850 NR Description: Probable UDP-glucose 4-epimerase At4g10960
  misc_feature (1)..(72): NCBI GI NO: 15236988 NR Description: UDP-galactose 4-epimerase - like protein
  misc_feature (1)..(72): NCBI GI NO: 21553659 NR Description: UDP-galactose 4-epimerase-like protein
  misc_feature (1)..(72): NCBI GI NO: 11386775 NR Description: UDP-glucose 4-epimerase GEPI48
  misc_feature (1)..(72): NCBI GI NO: 15217653 NR Description: UDP-galactose 4-epimerase, putative
  misc_feature (1)..(72): NCBI GI NO: 6633809 NR Description: F1N19.2 [Arabidopsis thaliana]
MAANGCKKLVFSSSATVYGWPKEVPCTEEFPLCATNPYGRTKLVIEDICRDVHRSDPDWKIILLRYFNPVGAH

SEQ ID NO: 41805 - DNA, 1578 bp, Zea mays subsp. mays
  misc_feature (1)..(1578): Ceres Seq. ID no. 12382623
caaaaatggtgccatgcatggatctgctgtccggagttgttacagcatccttgatatagtacacaggctatggactccaattgatggggagtttgatgactacattatcaatccttagggtagcggttaccaatcactacacacagcagttcaggcatctgatagctcaccgctggaggtccagattagaacccagcgaatgcatgagtatgcagaacatggccttgctgctcattggctgtataaggagagcaaagttgagtacagaagtagcatgagtaagagaataagacaaagtacatcatattcatctagttcttcagaagatgaaagttctatacaggatgatatcccatcaaagtacagttcaatgaaagtggggcatccagtgctaagaattgaaggtagtcacttactagcagctgtcgtagtcagtatagataaaggaggaaaggaattgattgttgctgtaagttttagtcttgaagcttctgaagctgtagctgagctaaggtcatcttttcagttgaagcgttgggaagcctatgctaggcttcataaaaaggtttctgagaagtggtggtgtgcacctggacatggtgactggtcaacaaatctggagaggtacacactatgccaggatgggatatttcataagcaagaccaatttgggagacttttacctacatttattcaaataattgatttggcggaagaggaagaggaagagtattggatggttgtatctgccatattcgagggaaaggaaacttgcagtctaccatctgaatcgagttatgctgataaatcatcatctgaacctccaagttctactccattaagcgaccccatcaacaataaggtgcatttgctcagaaccatgcttcaatgggaggagcaagttcgccgtggcgcatctttggcagagaaaagtctcagtgcaagcacctgcacaaaggcaatcctgcgtgaggtggccataatattctggcctaatggcaagattatgagaatgagcactggtagcacagctgctgacgctgctagaagaatgggcgtcgaagggaagctgctctgggttaatggccaactagtgctgccccaaacagagctaaaggatggggatatagttgaagtgagggtatagatgcaagtaccagattccagtacaccttcctcagggttattgatcatattggttcctcagttcttgccctatcttggcaatgcatcgaacctcaattgtacagtccattggtcgaaatgaatcgaagaaagaaggattaggtcctgtgtacataagaaactgcaagtataaaagctgtctgtccagctgtgcttctccttgcccatagttacagtggtaatgtaaatttccgtaagtaaagatgtagtaatgtttagttagtggtccacatttcagcgtgaagttatgaagtgcagtagcgctgcaagttttttttatatatatgtccaaagtagatgtctcatgctgcctaaaaaaatgtccatgtcccgtaatttggcaagccaagattgccagaaaactcatggaggatatggcaaccattttcaact

SEQ ID NO: 41806 - protein, 315 aa, Zea mays subsp. mays
  peptide (1)..(315): Ceres Seq. ID no. 12382624
  misc_feature (1)..(116): NCBI GI NO: 15231772 NR Description: putative GTP pyrophosphokinase
  misc_feature (1)..(53): NCBI GI NO: 30143060 NR Description: RelA/SpoT [Staphylococcus aureus subsp. aureus]
  misc_feature (1)..(18): NCBI GI NO: 22985317 NR Description: hypothetical protein [Burkholderia fungorum]
  misc_feature (1)..(53): NCBI GI NO: 27468233 NR Description: GTP pyrophosphokinase
  misc_feature (1)..(49): NCBI GI NO: 24215784 NR Description: GTP pyrophosphokinase
  misc_feature (1)..(48): NCBI GI NO: 21402450 NR Description: TGS, TGS domain [Bacillus anthracis A2012]
  misc_feature (1)..(48): NCBI GI NO: 14325225 NR Description: Rel [Listeria monocytogenes]
  misc_feature (1)..(48): NCBI GI NO: 16803563 NR Description: similar to (p)ppGpp synthetase
  misc_feature (1)..(48): NCBI GI NO: 30264477 NR Description: GTP pyrophosphokinase
  misc_feature (1)..(48): NCBI GI NO: 30022482 NR Description: GTP pyrophosphokinase [Bacillus cereus ATCC 14579]
MHEYAEHGLAAHWLYKESKVEYRSSMSKRIRQSTSYSSSSSEDESSIQDDIPSKYSSMKVGHPVLRIEGSHLLAAVVVSIDKGGKELIVAVSFSLEASEAVAELRSSFQLKRWEAYARLHKKVSEKWWCAPGHGDWSTNLERYTLCQDGIFHKQDQFGRLLPTFIQIIDLAEEEEEEYWMVVSAIFEGKETCSLPSESSYADKSSSEPPSSTPLSDPINNKVHLLRTMLQWEEQVRRGASLAEKSLSASTCTKAILREVAIIFWPNGKIMRMSTGSTAADAARRMGVEGKLLWVNGQLVLPQTELKDGDIVEVRV

SEQ ID NO: 41807 - protein, 290 aa, Zea mays subsp. mays
  peptide (1)..(290): Ceres Seq. ID no. 12382625
  misc_feature (1)..(91): NCBI GI NO: 15231772 NR Description: putative GTP pyrophosphokinase
  misc_feature (1)..(28): NCBI GI NO: 30143060 NR Description: RelA/SpoT [Staphylococcus aureus subsp. aureus]
  misc_feature (1)..(28): NCBI GI NO: 27468233 NR Description: GTP pyrophosphokinase
  misc_feature (1)..(24): NCBI GI NO: 24215784 NR Description: GTP pyrophosphokinase
  misc_feature (1)..(23): NCBI GI NO: 21402450 NR Description: TGS, TGS domain [Bacillus anthracis A2012]
  misc_feature (1)..(23): NCBI GI NO: 14325225 NR Description: Rel [Listeria monocytogenes]
  misc_feature (1)..(23): NCBI GI NO: 30264477 NR Description: GTP pyrophosphokinase
  misc_feature (1)..(23): NCBI GI NO: 30022482 NR Description: GTP pyrophosphokinase [Bacillus cereus ATCC 14579]
  misc_feature (1)..(23): NCBI GI NO: 16803563 NR Description: similar to (p)ppGpp synthetase
  misc_feature (1)..(23): NCBI GI NO: 16800626 NR Description: similar to (p)ppGpp synthetase [Listeria innocua]
MSKRIRQSTSYSSSSSEDESSIQDDIPSKYSSMKVGHPVLRIEGSHLLAAVVVSIDKGGKELIVAVSFSLEASEAVAELRSSFQLKRWEAYARLHKKVSEKWWCAPGHGDWSTNLERYTLCQDGIFHKQDQFGRLLPTFIQIIDLAEEEEEEYWMVVSAIFEGKETCSLPSESSYADKSSSEPPSSTPLSDPINNKVHLLRTMLQWEEQVRRGASLAEKSLSASTCTKAILREVAIIFWPNGKIMRMSTGSTAADAARRMGVEGKLLWVNGQLVLPQTELKDGDIVEVRV

SEQ ID NO: 41808 - protein, 258 aa, Zea mays subsp. mays
  peptide (1)..(258): Ceres Seq. ID no. 12382626
  misc_feature (1)..(59): NCBI GI NO: 15231772 NR Description: putative GTP pyrophosphokinase
  misc_feature (1)..(59): NCBI GI NO: 7141306 NR Description: RSH2 [Arabidopsis thaliana]
MKVGHPVLRIEGSHLLAAVVVSIDKGGKELIVAVSFSLEASEAVAELRSSFQLKRWEAYARLHKKVSEKWWCAPGHGDWSTNLERYTLCQDGIFHKQDQFGRLLPTFIQIIDLAEEEEEEYWMVVSAIFEGKETCSLPSESSYADKSSSEPPSSTPLSDPINNKVHLLRTMLQWEEQVRRGASLAEKSLSASTCTKAILREVAIIFWPNGKIMRMSTGSTAADAARRMGVEGKLLWVNGQLVLPQTELKDGDIVEVRV

SEQ ID NO: 41809 - DNA, 439 bp, Zea mays subsp. mays
  misc_feature (1)..(439): Ceres Seq. ID no. 4377636
gagtacgagcggctactcccggcggcggcggcgatgagcgcggtgaacatcaccaacgtggcggtgctggataaccccaccgccttcctcaatcccttccagtttgagatctcctacgagtgcctcgtgcccctcgacgacgatctggagtggaagcttatatatgttggatcagctgaagatgaaaactacgatcaacagcttgagagcgtgcttgttggccctgtcaatgttgggacctaccgttttgtccttcaggctgacccaccggatccctcaaagatccgtgaggaagacataattggtgtgactgtgctgctattgacatgctcttacatgggccaggagttcatgagagtaggcyactacgtgaacaacgattattatgatgaacaattgaragaagaacctccascaaargtgctaattgaccgggtgc

SEQ ID NO: 41810 - protein, 146 aa, Zea mays subsp. mays
  peptide (1)..(146): Ceres Seq. ID no. 4377637
  misc_feature (12)..(145): Pfam Name: Pfam Description:  Anti-silencing protein, ASF1-like
  misc_feature (12)..(145): NCBI GI NO: 15219729 NR Description: hypothetical protein; protein id: At1g66740
  misc_feature (12)..(145): NCBI GI NO: 15240842 NR Description: anti-silencing factor 1-like protein
  misc_feature (23)..(145): NCBI GI NO: 6069498 NR Description: S-locus protein 7 [Brassica rapa]
  misc_feature (12)..(145): NCBI GI NO: 17737649 NR Description: anti-silencing factor 1 CG9383-PA
  misc_feature (36)..(145): NCBI GI NO: 34911252 NR Description: putative anti-silencing factor 1-like protein
  misc_feature (12)..(145): NCBI GI NO: 31215032 NR Description: ENSANGP00000013594 [Anopheles gambiae]
  misc_feature (12)..(140): NCBI GI NO: 6841514 NR Description: HSPC146 [Homo sapiens]
  misc_feature (12)..(140): NCBI GI NO: 7661592 NR Description: anti-silencing function 1A; DKFZP547E2110 protein
  misc_feature (12)..(140): NCBI GI NO: 33416731 NR Description: Unknown (protein for MGC:69151) [Xenopus laevis]
  misc_feature (1)..(140): NCBI GI NO: 34851461 NR Description: similar to ASF1 anti-silencing function 1 homolog B
  misc_feature (122)..(122): Xaa is any aa, unknown or other
  misc_feature (134)..(134): Xaa is any aa, unknown or other
  misc_feature (139)..(139): Xaa is any aa, unknown or other
  misc_feature (140)..(140): Xaa is any aa, unknown or other
EYERLLPAAAAMSAVNITNVAVLDNPTAFLNPFQFEISYECLVPLDDDLEWKLIYVGSAEDENYDQQLESVLVGPVNVGTYRFVLQADPPDPSKIREEDIIGVTVLLLTCSYMGQEFMRVGXYVNNDYYDEQLXEEPPXXVLIDRV

SEQ ID NO: 41811 - protein, 135 aa, Zea mays subsp. mays
  peptide (1)..(135): Ceres Seq. ID no. 4377638
  misc_feature (1)..(134): Pfam Name: Pfam Description:  Anti-silencing protein, ASF1-like
  misc_feature (1)..(134): NCBI GI NO: 15219729 NR Description: hypothetical protein; protein id: At1g66740
  misc_feature (1)..(134): NCBI GI NO: 15240842 NR Description: anti-silencing factor 1-like protein
  misc_feature (12)..(134): NCBI GI NO: 6069498 NR Description: S-locus protein 7 [Brassica rapa]
  misc_feature (1)..(134): NCBI GI NO: 17737649 NR Description: anti-silencing factor 1 CG9383-PA
  misc_feature (25)..(134): NCBI GI NO: 34911252 NR Description: putative anti-silencing factor 1-like protein
  misc_feature (1)..(134): NCBI GI NO: 31215032 NR Description: ENSANGP00000013594 [Anopheles gambiae]
  misc_feature (1)..(129): NCBI GI NO: 6841514 NR Description: HSPC146 [Homo sapiens]
  misc_feature (1)..(129): NCBI GI NO: 7661592 NR Description: anti-silencing function 1A; DKFZP547E2110 protein
  misc_feature (1)..(129): NCBI GI NO: 33416731 NR Description: Unknown (protein for MGC:69151) [Xenopus laevis]
  misc_feature (1)..(129): NCBI GI NO: 34851461 NR Description: similar to ASF1 anti-silencing function 1 homolog B
  misc_feature (111)..(111): Xaa is any aa, unknown or other
  misc_feature (123)..(123): Xaa is any aa, unknown or other
  misc_feature (128)..(128): Xaa is any aa, unknown or other
  misc_feature (129)..(129): Xaa is any aa, unknown or other
MSAVNITNVAVLDNPTAFLNPFQFEISYECLVPLDDDLEWKLIYVGSAEDENYDQQLESVLVGPVNVGTYRFVLQADPPDPSKIREEDIIGVTVLLLTCSYMGQEFMRVGXYVNNDYYDEQLXEEPPXXVLIDRV

SEQ ID NO: 41812 - DNA, 2974 bp, Zea mays subsp. mays; identical to SEQ ID NO: 35434
  misc_feature (1)..(2974): Ceres Seq. ID no. 13569654
  misc_feature (2856)..(2856): n is a, c, t, g, unknown, or other
  misc_feature (2929)..(2929): n is a, c, t, g, unknown, or other
  misc_feature (2823)..(2823): n is a, c, t, g, unknown, or other
  misc_feature (2697)..(2697): n is a, c, t, g, unknown, or other
  misc_feature (2703)..(2703): n is a, c, t, g, unknown, or other
  misc_feature (2654)..(2654): n is a, c, t, g, unknown, or other
  misc_feature (2962)..(2962): n is a, c, t, g, unknown, or other
  misc_feature (2770)..(2770): n is a, c, t, g, unknown, or other
  misc_feature (2612)..(2612): n is a, c, t, g, unknown, or other
  misc_feature (2680)..(2680): n is a, c, t, g, unknown, or other
  misc_feature (2761)..(2761): n is a, c, t, g, unknown, or other
  misc_feature (2917)..(2917): n is a, c, t, g, unknown, or other
  misc_feature (2914)..(2914): n is a, c, t, g, unknown, or other
  misc_feature (2872)..(2872): n is a, c, t, g, unknown, or other
  misc_feature (2717)..(2717): n is a, c, t, g, unknown, or other
  misc_feature (2762)..(2762): n is a, c, t, g, unknown, or other
  misc_feature (2873)..(2873): n is a, c, t, g, unknown, or other
  misc_feature (2771)..(2771): n is a, c, t, g, unknown, or other
  misc_feature (2731)..(2731): n is a, c, t, g, unknown, or other

SEQ ID NO: 41813 - protein, 542 aa, Zea mays subsp. mays; identical to SEQ ID NO: 35435
  peptide (1)..(542): Ceres Seq. ID no. 13569655
  misc_feature (307)..(457): Pfam Name: Pfam Description:  Protein kinase domain
  misc_feature (23)..(457): NCBI GI NO: 17027283 NR Description: putative protein kinase
  misc_feature (458)..(491): NCBI GI NO: 17027283 NR Description: putative protein kinase
  misc_feature (30)..(491): NCBI GI NO: 33146554 NR Description: putative MAP3K protein kinase
  misc_feature (30)..(491): NCBI GI NO: 34915394 NR Description: putative MAP3K protein kinase
  misc_feature (18)..(505): NCBI GI NO: 15982852 NR Description: AT5g66850/MUD21_11 [Arabidopsis thaliana]
  misc_feature (18)..(505): NCBI GI NO: 18425121 NR Description: MAP protein kinase [Arabidopsis thaliana]
  misc_feature (306)..(505): NCBI GI NO: 25387031 NR Description: mitogen-activated protein kinase MAP3K
  misc_feature (306)..(505): NCBI GI NO: 9758135 NR Description: MAP protein kinase [Arabidopsis thaliana]
  misc_feature (227)..(480): NCBI GI NO: 38345839 NR Description: OSJNBa0084K11.3
  misc_feature (174)..(479): NCBI GI NO: 30695537 NR Description: mitogen-activated protein kinase kinase  kinase

SEQ ID NO: 41814 - protein, 502 aa, Zea mays subsp. mays; identical to SEQ ID NO: 35436
  peptide (1)..(502): Ceres Seq. ID no. 13569656
  misc_feature (267)..(417): Pfam Name: Pfam Description:  Protein kinase domain
  misc_feature (1)..(417): NCBI GI NO: 17027283 NR Description: putative protein kinase
  misc_feature (418)..(451): NCBI GI NO: 17027283 NR Description: putative protein kinase
  misc_feature (1)..(451): NCBI GI NO: 33146554 NR Description: putative MAP3K protein kinase
  misc_feature (1)..(451): NCBI GI NO: 34915394 NR Description: putative MAP3K protein kinase
  misc_feature (1)..(465): NCBI GI NO: 15982852 NR Description: AT5g66850/MUD21_11 [Arabidopsis thaliana]
  misc_feature (1)..(465): NCBI GI NO: 18425121 NR Description: MAP protein kinase [Arabidopsis thaliana]
  misc_feature (266)..(465): NCBI GI NO: 25387031 NR Description: mitogen-activated protein kinase MAP3K
  misc_feature (266)..(465): NCBI GI NO: 9758135 NR Description: MAP protein kinase [Arabidopsis thaliana]
  misc_feature (187)..(440): NCBI GI NO: 38345839 NR Description: OSJNBa0084K11.3
  misc_feature (134)..(439): NCBI GI NO: 30695537 NR Description: mitogen-activated protein kinase kinase  kinase

SEQ ID NO: 41815 - protein, 460 aa, Zea mays subsp. mays; identical to SEQ ID NO: 35437
  peptide (1)..(460): Ceres Seq. ID no. 13569657
  misc_feature (225)..(375): Pfam Name: Pfam Description:  Protein kinase domain
  misc_feature (1)..(375): NCBI GI NO: 17027283 NR Description: putative protein kinase
  misc_feature (376)..(409): NCBI GI NO: 17027283 NR Description: putative protein kinase
  misc_feature (1)..(409): NCBI GI NO: 33146554 NR Description: putative MAP3K protein kinase
  misc_feature (1)..(409): NCBI GI NO: 34915394 NR Description: putative MAP3K protein kinase
  misc_feature (1)..(423): NCBI GI NO: 15982852 NR Description: AT5g66850/MUD21_11 [Arabidopsis thaliana]
  misc_feature (1)..(423): NCBI GI NO: 18425121 NR Description: MAP protein kinase [Arabidopsis thaliana]
  misc_feature (224)..(423): NCBI GI NO: 25387031 NR Description: mitogen-activated protein kinase MAP3K
  misc_feature (224)..(423): NCBI GI NO: 9758135 NR Description: MAP protein kinase [Arabidopsis thaliana]
  misc_feature (145)..(398): NCBI GI NO: 38345839 NR Description: OSJNBa0084K11.3
  misc_feature (92)..(397): NCBI GI NO: 30695537 NR Description: mitogen-activated protein kinase kinase  kinase

SEQ ID NO: 41816 - DNA, 2039 bp, Zea mays subsp. mays
  misc_feature (1)..(2039): Ceres Seq. ID no. 13503133
gcccacgcagcaatctggtcttctggaaatctccatcaatccgattccgaacggcagaaaattttcccttcccccggccaccaaccaaccaaacccgagcaaccagcctgagccacctcccatgcgccgcgccgcagcctgaggaggaggaggaggacgcggtggtctggagagggatggagggcgcgtcctcgctgccgcccttcctgagcaagacgtacgagatggtggacgacccggccacggacgccgtggtggcgtggacgccgctggggaccagcttcgtcgtcgcgaaccaggccgagttctggagggatctgctccccaagtacttcaagcacaacaacttctccagcttcgtgcggcaactgaacacctacgtaagcccccaccgcacagcacgatcattcattttcttcgccccatctccctctctgtccacctgtggttttgatcaatcggggtgcgtggcggcgtgctactgtcagctatgctgttgcccctttgcaaaaaaactccacaagttggcatttggggggcgaatcttgttagccttgtagtagaacaattgtttagggtatcgtcttcggtcgaatgaactgtttccttgttatagcatagcgtgttgacaacttggtggcgataactttaaattacatgtgtccactatatatctagtatatatgctcaattatcttgttgagatgtttttccttttctaaatccaactagagttagtgtaccttttgacaaatgaagtgctgctaacggtaaacactgttgaattggcatctttgttgacacccaaattaaatccaatagaaaccataatgatttcggatggttacttttgatttatgagccttgatgggtcaaatttctgtgatgttgtgttaatcgttttcctgcttcttcttatgtagggctttaagaaaattgatcctgaacaatgggagtttgcaaatgatgatttcattaggggacaacagcaccgactgaaaaatatacacaggcgtaagcctatattcagccattcatcgcatactcagggttctggaccattaccagataccgaaaggagggattatgaggaggaaatcgaaaggcttaagtgtgacaatgcagctctgacctcagagcttgaaaagaatgcacagaagaaacttgttacagagaaacgaatgcaggatctagaagataagttgatctttttggaggatcggcagaagaatctgatggcgtatgtcagggatattgtacaggcaccaggatctttctctagctttgtgcagcaacctgatcatcacggaaagaaaaggagactaccagtacctatctctctctaccaagattctaatgctaaggggaaccaggttgtgcatgggagcttcatcaccaacccaccagcttgcagggaatcatttgacaagacggaatcttcattgaactcgttggagaatttccttcgggaagcgagtgaagcgttcaatatttcatatgatgatggcctccctggcccttcatctgctgtcgttatcacagagctccattcgtccggagaaagtgatccccatgtgccatcacctgtctcaagaatgcatacatcttcggctggtgcgggagattcgctctcttcccgcgatttaacagagtcaactagctgcgctgagagccctcgcctccctcagatccaaccctgtacagattcacgaactaaggtgtctgagatcgatgtcaatcgggagcctgctgtcacagaaactggtccgacaagggaccaacctgccgaggagcctccccacgtagcagctggggtgaacgatggcttctggcagcagttcctcaccgagcagcccggtcctgatgtacaccaggaggcccaatcagaaaggagagatggcgatgatgataagggcgatcagacgaggataggggaccgagaaaatttttggtgggggaagaagaatgttgagcagatgagagagaagctggggcgtctcacctcggtggagaaaacctgactgtatttcttgtagctg

SEQ ID NO: 41817 - protein, 279 aa, Zea mays subsp. mays
  peptide (1)..(279): Ceres Seq. ID no. 13503134
  misc_feature (1)..(279): NCBI GI NO: 34909524 NR Description: putative heat shock factor
  misc_feature (1)..(112): NCBI GI NO: 2130134 NR Description: heat shock transcription factor
  misc_feature (1)..(102): NCBI GI NO: 5821138 NR Description: heat shock factor [Nicotiana tabacum]
  misc_feature (152)..(279): NCBI GI NO: 5821138 NR Description: heat shock factor [Nicotiana tabacum]
  misc_feature (1)..(101): NCBI GI NO: 3399765 NR Description: heat shock transcription factor 21
  misc_feature (1)..(101): NCBI GI NO: 15234053 NR Description: heat shock transcription factor 21
  misc_feature (149)..(279): NCBI GI NO: 3399765 NR Description: heat shock transcription factor 21
  misc_feature (149)..(279): NCBI GI NO: 15234053 NR Description: heat shock transcription factor 21
  misc_feature (1)..(114): NCBI GI NO: 15242478 NR Description: heat shock transcription factor family
  misc_feature (175)..(269): NCBI GI NO: 15242478 NR Description: heat shock transcription factor family
MQDLEDKLIFLEDRQKNLMAYVRDIVQAPGSFSSFVQQPDHHGKKRRLPVPISLYQDSNAKGNQVVHGSFITNPPACRESFDKTESSLNSLENFLREASEAFNISYDDGLPGPSSAVVITELHSSGESDPHVPSPVSRMHTSSAGAGDSLSSRDLTESTSCAESPRLPQIQPCTDSRTKVSEIDVNREPAVTETGPTRDQPAEEPPHVAAGVNDGFWQQFLTEQPGPDVHQEAQSERRDGDDDKGDQTRIGDRENFWWGKKNVEQMREKLGRLTSVEKT

SEQ ID NO: 41818 - protein, 261 aa, Zea mays subsp. mays
  peptide (1)..(261): Ceres Seq. ID no. 13503135
  misc_feature (1)..(261): NCBI GI NO: 34909524 NR Description: putative heat shock factor
  misc_feature (1)..(94): NCBI GI NO: 2130134 NR Description: heat shock transcription factor
  misc_feature (1)..(84): NCBI GI NO: 5821138 NR Description: heat shock factor [Nicotiana tabacum]
  misc_feature (134)..(261): NCBI GI NO: 5821138 NR Description: heat shock factor [Nicotiana tabacum]
  misc_feature (1)..(83): NCBI GI NO: 3399765 NR Description: heat shock transcription factor 21
  misc_feature (1)..(83): NCBI GI NO: 15234053 NR Description: heat shock transcription factor 21
  misc_feature (131)..(261): NCBI GI NO: 3399765 NR Description: heat shock transcription factor 21
  misc_feature (131)..(261): NCBI GI NO: 15234053 NR Description: heat shock transcription factor 21
  misc_feature (1)..(96): NCBI GI NO: 15242478 NR Description: heat shock transcription factor family
  misc_feature (157)..(251): NCBI GI NO: 15242478 NR Description: heat shock transcription factor family
MAYVRDIVQAPGSFSSFVQQPDHHGKKRRLPVPISLYQDSNAKGNQVVHGSFITNPPACRESFDKTESSLNSLENFLREASEAFNISYDDGLPGPSSAVVITELHSSGESDPHVPSPVSRMHTSSAGAGDSLSSRDLTESTSCAESPRLPQIQPCTDSRTKVSEIDVNREPAVTETGPTRDQPAEEPPHVAAGVNDGFWQQFLTEQPGPDVHQEAQSERRDGDDDKGDQTRIGDRENFWWGKKNVEQMREKLGRLTSVEKT

SEQ ID NO: 41819 - protein, 185 aa, Zea mays subsp. mays
  peptide (1)..(185): Ceres Seq. ID no. 13503136
  misc_feature (66)..(126): Pfam Name: Pfam Description:  HSF-type DNA-binding
  misc_feature (58)..(126): NCBI GI NO: 34909524 NR Description: putative heat shock factor
  misc_feature (59)..(126): NCBI GI NO: 2130134 NR Description: heat shock transcription factor
  misc_feature (63)..(145): NCBI GI NO: 5821138 NR Description: heat shock factor [Nicotiana tabacum]
  misc_feature (62)..(126): NCBI GI NO: 3399765 NR Description: heat shock transcription factor 21
  misc_feature (62)..(126): NCBI GI NO: 15234053 NR Description: heat shock transcription factor 21
  misc_feature (61)..(126): NCBI GI NO: 15242478 NR Description: heat shock transcription factor family
  misc_feature (58)..(126): NCBI GI NO: 16580739 NR Description: heat stress transcription factor Spl7
  misc_feature (58)..(126): NCBI GI NO: 16580743 NR Description: spl7 protein [Oryza sativa]
  misc_feature (62)..(126): NCBI GI NO: 7158882 NR Description: heat shock transcription factor [Medicago sativa]
  misc_feature (58)..(126): NCBI GI NO: 18414114 NR Description: heat shock transcription factor family
PRSNLVFWKSPSIRFRTAENFPFPRPPTNQTRATSLSHLPCAAPQPEEEEEDAVVWRGMEGASSLPPFLSKTYEMVDDPATDAVVAWTPLGTSFVVANQAEFWRDLLPKYFKHNNFSSFVRQLNTYVSPHRTARSFIFFAPSPSLSTCGFDQSGCVAACYCQLCCCPFAKKLHKLAFGGRILLAL

SEQ ID NO: 41820 - DNA, 1757 bp, Zea mays subsp. mays
  misc_feature (1)..(1757): Ceres Seq. ID no. 12435555
  misc_feature (910)..(910): n is a, c, t, g, unknown, or other
  misc_feature (1222)..(1222): n is a, c, t, g, unknown, or other
  misc_feature (813)..(813): n is a, c, t, g, unknown, or other
  misc_feature (1006)..(1006): n is a, c, t, g, unknown, or other
  misc_feature (837)..(837): n is a, c, t, g, unknown, or other
  misc_feature (972)..(972): n is a, c, t, g, unknown, or other
  misc_feature (1687)..(1687): n is a, c, t, g, unknown, or other
  misc_feature (1005)..(1005): n is a, c, t, g, unknown, or other
  misc_feature (973)..(973): n is a, c, t, g, unknown, or other
  misc_feature (925)..(925): n is a, c, t, g, unknown, or other
  misc_feature (969)..(969): n is a, c, t, g, unknown, or other
  misc_feature (933)..(933): n is a, c, t, g, unknown, or other
  misc_feature (923)..(923): n is a, c, t, g, unknown, or other
  misc_feature (1554)..(1554): n is a, c, t, g, unknown, or other
  misc_feature (994)..(994): n is a, c, t, g, unknown, or other
  misc_feature (922)..(922): n is a, c, t, g, unknown, or other
  misc_feature (815)..(815): n is a, c, t, g, unknown, or other
gtccgccgcctcctctctccgcacaggctcaccaaacgacgaacactctccctcgacccgtgaccgtgagcaagcgggtggcgacggcgcgcggccggccatggtgagcgagagcaaccgcggcggtgcggaccggacgacggcggcgggggaggagcgcgggcagctgctgttcgacgtgccggagatcaggttcaccaagctcttcatcaacggatccttcgtcgacgccgtctcagagccggacgttcgagacgagggacccgcgcacggggggcgtcatcgccagcgtggcagaagctgacaaagaagacgtggacttggcagtgagggcagccagggccgctttcgaccacggcgagtggccacgcatgtctggatccgaacgggggcggatcatggcgaggctggccgacctggtggaggagcgcgcggacgagctggcggccctggagagcctggacgccggcaagcacccggccgtgacccgggcggtggacgtcggcaacgccgccggcagcctgcgctacttcgccggcgcggccgacaagatccacggcgagacgctcaagatgccgggccagttccagggccacaccctgcgcgagccgctcggcgtcgccggcgtcatcatcccctggaacttcccgtccaccatgttcgccgtcaaggtggcgccggcgctggccgcacggctgcgccctggtcgtcaagcccgccgagcagacgccgctcagcgccctgtacctcgcgcagctcgccaagcaggcaggggtcccagacggcgtgatcaacgtcgtgccaggcttcggncngacggcaggagccgcgctggcntctcacatggacgttgacatggtgagtttcaccggatccacggaggtcgggcgccttataatgaaggcctccncggagagcaacnngnagcccgtntacctggagctgggcggcaagtccccgctcatcgtnttnnacgacgccgacctcgacatgnccgtggagctnnccgtcggcgccagcttctttaacaagggagaggcctgcgtcgccgcgagccgcgtctacgtgcaggaacgcgtctacgacaggttcgaggagaggttgccggagaggatgaggagctgggtcgtgggcgacccgttcagcgaccctagcgccgaccagggcccgcaggtggacaaggctcagtatgagagggttctgagctacattgaccatggcnagcgagaaggggccactcttctgactggaggaaggccatgcggtccggaagggaaaggctactacattgagcccacagttttcaccaacgtcaaggaggacatgatcatagcgaaggaggagatcttcggacccgtcatgtgcctgatgaagttcaagacggtggaggaggcgatcgcgagggcgaacgacacgcggtacgggctgggggcgggggtggtgacgcgggacctggacgtggcgaaccgggtggtgaggtcggtgcgcgccggggtggtgtgggtgaactgctacttcgccatgggcagcgactgccccttcggcggccgcaanatgagcggcttcggcaaggacgagggcatgcacgcgctcgacaagtacctggccgtcaagtccgtcgtcaccccgctccgcgcctcgccctggatctgattctctttaatttctggtgtcagtcacccacccncaacacatatacagcagtggtcaaaagatatttatttattgataataaagtagctagctatattgtgcgg

SEQ ID NO: 41821 - protein, 269 aa, Zea mays subsp. mays
  peptide (1)..(269): Ceres Seq. ID no. 12435556
  misc_feature (1)..(268): NCBI GI NO: 19850247 NR Description: cytosolic aldehyde dehydrogenase RF2D [Zea mays]
  misc_feature (1)..(269): NCBI GI NO: 19850243 NR Description: cytosolic aldehyde dehydrogenase RF2C [Zea mays]
  misc_feature (1)..(269): NCBI GI NO: 19850241 NR Description: cytosolic aldehyde dehydrogenase RF2C [Zea mays]
  misc_feature (1)..(268): NCBI GI NO: 34912252 NR Description: putative cytosolic aldehyde dehydrogenase
  misc_feature (1)..(269): NCBI GI NO: 34912248 NR Description: cytosolic aldehyde dehydrogenase
  misc_feature (1)..(268): NCBI GI NO: 19850245 NR Description: cytosolic aldehyde dehydrogenase RF2D [Zea mays]
  misc_feature (1)..(269): NCBI GI NO: 18404212 NR Description: Expressed protein; protein id: At3g24503
  misc_feature (1)..(269): NCBI GI NO: 15228319 NR Description: aldehyde dehydrogenase
  misc_feature (1)..(269): NCBI GI NO: 18395300 NR Description: putative aldehyde dehydrogenase
  misc_feature (1)..(269): NCBI GI NO: 20530129 NR Description: mitochondrial aldehyde dehydrogenase
  misc_feature (23)..(23): Xaa is any aa, unknown or other
  misc_feature (27)..(27): Xaa is any aa, unknown or other
  misc_feature (28)..(28): Xaa is any aa, unknown or other
  misc_feature (30)..(30): Xaa is any aa, unknown or other
  misc_feature (42)..(42): Xaa is any aa, unknown or other
  misc_feature (43)..(43): Xaa is any aa, unknown or other
  misc_feature (44)..(44): Xaa is any aa, unknown or other
  misc_feature (51)..(51): Xaa is any aa, unknown or other
  misc_feature (54)..(54): Xaa is any aa, unknown or other
  misc_feature (55)..(55): Xaa is any aa, unknown or other
  misc_feature (127)..(127): Xaa is any aa, unknown or other
  misc_feature (237)..(237): Xaa is any aa, unknown or other
MDVDMVSFTGSTEVGRLIMKASXESNXXPXYLELGGKSPLIXXXDADLDMXVEXXVGASFFNKGEACVAASRVYVQERVYDRFEERLPERMRSWVVGDPFSDPSADQGPQVDKAQYERVLSYIDHGXREGATLLTGGRPCGPEGKGYYIEPTVFTNVKEDMIIAKEEIFGPVMCLMKFKTVEEAIARANDTRYGLGAGVVTRDLDVANRVVRSVRAGVVWVNCYFAMGSDCPFGGRXMSGFGKDEGMHALDKYLAVKSVVTPLRASPWI

SEQ ID NO: 41822 - protein, 265 aa, Zea mays subsp. mays
  peptide (1)..(265): Ceres Seq. ID no. 12435557
  misc_feature (1)..(264): NCBI GI NO: 19850247 NR Description: cytosolic aldehyde dehydrogenase RF2D [Zea mays]
  misc_feature (1)..(265): NCBI GI NO: 19850243 NR Description: cytosolic aldehyde dehydrogenase RF2C [Zea mays]
  misc_feature (1)..(265): NCBI GI NO: 19850241 NR Description: cytosolic aldehyde dehydrogenase RF2C [Zea mays]
  misc_feature (1)..(264): NCBI GI NO: 34912252 NR Description: putative cytosolic aldehyde dehydrogenase
  misc_feature (1)..(265): NCBI GI NO: 34912248 NR Description: cytosolic aldehyde dehydrogenase
  misc_feature (1)..(264): NCBI GI NO: 19850245 NR Description: cytosolic aldehyde dehydrogenase RF2D [Zea mays]
  misc_feature (1)..(265): NCBI GI NO: 18404212 NR Description: Expressed protein; protein id: At3g24503
  misc_feature (1)..(265): NCBI GI NO: 15228319 NR Description: aldehyde dehydrogenase
  misc_feature (1)..(265): NCBI GI NO: 18395300 NR Description: putative aldehyde dehydrogenase
  misc_feature (1)..(265): NCBI GI NO: 20530129 NR Description: mitochondrial aldehyde dehydrogenase
  misc_feature (19)..(19): Xaa is any aa, unknown or other
  misc_feature (23)..(23): Xaa is any aa, unknown or other
  misc_feature (24)..(24): Xaa is any aa, unknown or other
  misc_feature (26)..(26): Xaa is any aa, unknown or other
  misc_feature (38)..(38): Xaa is any aa, unknown or other
  misc_feature (39)..(39): Xaa is any aa, unknown or other
  misc_feature (40)..(40): Xaa is any aa, unknown or other
  misc_feature (47)..(47): Xaa is any aa, unknown or other
  misc_feature (50)..(50): Xaa is any aa, unknown or other
  misc_feature (51)..(51): Xaa is any aa, unknown or other
  misc_feature (123)..(123): Xaa is any aa, unknown or other
  misc_feature (233)..(233): Xaa is any aa, unknown or other
MVSFTGSTEVGRLIMKASXESNXXPXYLELGGKSPLIXXXDADLDMXVEXXVGASFFNKGEACVAASRVYVQERVYDRFEERLPERMRSWVVGDPFSDPSADQGPQVDKAQYERVLSYIDHGXREGATLLTGGRPCGPEGKGYYIEPTVFTNVKEDMIIAKEEIFGPVMCLMKFKTVEEAIARANDTRYGLGAGVVTRDLDVANRVVRSVRAGVVWVNCYFAMGSDCPFGGRXMSGFGKDEGMHALDKYLAVKSVVTPLRASPWI

SEQ ID NO: 41823 - protein, 251 aa, Zea mays subsp. mays
  peptide (1)..(251): Ceres Seq. ID no. 12435558
  misc_feature (1)..(250): NCBI GI NO: 19850247 NR Description: cytosolic aldehyde dehydrogenase RF2D [Zea mays]
  misc_feature (1)..(251): NCBI GI NO: 19850243 NR Description: cytosolic aldehyde dehydrogenase RF2C [Zea mays]
  misc_feature (1)..(251): NCBI GI NO: 19850241 NR Description: cytosolic aldehyde dehydrogenase RF2C [Zea mays]
  misc_feature (1)..(250): NCBI GI NO: 34912252 NR Description: putative cytosolic aldehyde dehydrogenase
  misc_feature (1)..(251): NCBI GI NO: 34912248 NR Description: cytosolic aldehyde dehydrogenase
  misc_feature (1)..(250): NCBI GI NO: 19850245 NR Description: cytosolic aldehyde dehydrogenase RF2D [Zea mays]
  misc_feature (1)..(251): NCBI GI NO: 18404212 NR Description: Expressed protein; protein id: At3g24503
  misc_feature (1)..(251): NCBI GI NO: 15228319 NR Description: aldehyde dehydrogenase
  misc_feature (1)..(251): NCBI GI NO: 18395300 NR Description: putative aldehyde dehydrogenase
  misc_feature (1)..(251): NCBI GI NO: 20530129 NR Description: mitochondrial aldehyde dehydrogenase
  misc_feature (5)..(5): Xaa is any aa, unknown or other
  misc_feature (9)..(9): Xaa is any aa, unknown or other
  misc_feature (10)..(10): Xaa is any aa, unknown or other
  misc_feature (12)..(12): Xaa is any aa, unknown or other
  misc_feature (24)..(24): Xaa is any aa, unknown or other
  misc_feature (25)..(25): Xaa is any aa, unknown or other
  misc_feature (26)..(26): Xaa is any aa, unknown or other
  misc_feature (33)..(33): Xaa is any aa, unknown or other
  misc_feature (36)..(36): Xaa is any aa, unknown or other
  misc_feature (37)..(37): Xaa is any aa, unknown or other
  misc_feature (109)..(109): Xaa is any aa, unknown or other
  misc_feature (219)..(219): Xaa is any aa, unknown or other
MKASXESNXXPXYLELGGKSPLIXXXDADLDMXVEXXVGASFFNKGEACVAASRVYVQERVYDRFEERLPERMRSWVVGDPFSDPSADQGPQVDKAQYERVLSYIDHGXREGATLLTGGRPCGPEGKGYYIEPTVFTNVKEDMIIAKEEIFGPVMCLMKFKTVEEAIARANDTRYGLGAGVVTRDLDVANRVVRSVRAGVVWVNCYFAMGSDCPFGGRXMSGFGKDEGMHALDKYLAVKSVVTPLRASPWI

SEQ ID NO: 41824 - DNA, 1787 bp, Zea mays subsp. mays; identical to SEQ ID NO: 39324
  misc_feature (1)..(1787): Ceres Seq. ID no. 13498188

SEQ ID NO: 41825 - protein, 437 aa, Zea mays subsp. mays; identical to SEQ ID NO: 39325
  peptide (1)..(437): Ceres Seq. ID no. 13498189
  misc_feature (167)..(213): Pfam Name: Pfam Description:  Kelch motif
  misc_feature (1)..(437): NCBI GI NO: 37534254 NR Description: unknown protein
  misc_feature (22)..(437): NCBI GI NO: 19071626 NR Description: putative Kelch motif containing protein
  misc_feature (1)..(436): NCBI GI NO: 18405298 NR Description: Kelch repeat containing F-box protein family
  misc_feature (1)..(403): NCBI GI NO: 25405811 NR Description: unknown protein, 58496-60308
  misc_feature (73)..(387): NCBI GI NO: 18411974 NR Description: SKP1 interacting partner 4 (SKIP4), putative
  misc_feature (73)..(387): NCBI GI NO: 26453288 NR Description: putative SKP1 interacting partner 4 SKIP4
  misc_feature (65)..(371): NCBI GI NO: 7487225 NR Description: hypothetical protein T1F15
  misc_feature (65)..(371): NCBI GI NO: 15220452 NR Description: Kelch repeat containing F-box protein family
  misc_feature (64)..(403): NCBI GI NO: 18397351 NR Description: Kelch repeat containing F-box protein family
  misc_feature (73)..(344): NCBI GI NO: 15223520 NR Description: Kelch repeat containing F-box protein family

SEQ ID NO: 41826 - protein, 388 aa, Zea mays subsp. mays; identical to SEQ ID NO: 39326
  peptide (1)..(388): Ceres Seq. ID no. 13498190
  misc_feature (118)..(164): Pfam Name: Pfam Description:  Kelch motif
  misc_feature (1)..(388): NCBI GI NO: 37534254 NR Description: unknown protein
  misc_feature (1)..(388): NCBI GI NO: 19071626 NR Description: putative Kelch motif containing protein
  misc_feature (1)..(387): NCBI GI NO: 18405298 NR Description: Kelch repeat containing F-box protein family
  misc_feature (1)..(354): NCBI GI NO: 25405811 NR Description: unknown protein, 58496-60308
  misc_feature (24)..(338): NCBI GI NO: 18411974 NR Description: SKP1 interacting partner 4 (SKIP4), putative
  misc_feature (24)..(338): NCBI GI NO: 26453288 NR Description: putative SKP1 interacting partner 4 SKIP4
  misc_feature (16)..(322): NCBI GI NO: 7487225 NR Description: hypothetical protein T1F15
  misc_feature (16)..(322): NCBI GI NO: 15220452 NR Description: Kelch repeat containing F-box protein family
  misc_feature (15)..(354): NCBI GI NO: 18397351 NR Description: Kelch repeat containing F-box protein family
  misc_feature (24)..(295): NCBI GI NO: 15223520 NR Description: Kelch repeat containing F-box protein family

SEQ ID NO: 41827 - protein, 386 aa, Zea mays subsp. mays; identical to SEQ ID NO: 39327
  peptide (1)..(386): Ceres Seq. ID no. 13498191
  misc_feature (116)..(162): Pfam Name: Pfam Description:  Kelch motif
  misc_feature (1)..(386): NCBI GI NO: 37534254 NR Description: unknown protein
  misc_feature (1)..(386): NCBI GI NO: 19071626 NR Description: putative Kelch motif containing protein
  misc_feature (1)..(385): NCBI GI NO: 18405298 NR Description: Kelch repeat containing F-box protein family
  misc_feature (1)..(352): NCBI GI NO: 25405811 NR Description: unknown protein, 58496-60308
  misc_feature (22)..(336): NCBI GI NO: 18411974 NR Description: SKP1 interacting partner 4 (SKIP4), putative
  misc_feature (22)..(336): NCBI GI NO: 26453288 NR Description: putative SKP1 interacting partner 4 SKIP4
  misc_feature (14)..(320): NCBI GI NO: 7487225 NR Description: hypothetical protein T1F15
  misc_feature (14)..(320): NCBI GI NO: 15220452 NR Description: Kelch repeat containing F-box protein family
  misc_feature (13)..(352): NCBI GI NO: 18397351 NR Description: Kelch repeat containing F-box protein family
  misc_feature (22)..(293): NCBI GI NO: 15223520 NR Description: Kelch repeat containing F-box protein family

SEQ ID NO: 41828 - DNA, 613 bp, Zea mays subsp. mays
  misc_feature (1)..(613): Ceres Seq. ID no. 12637951
atccattccccacagtcattggagtcttctcttcggcctcccgctaaccgccatccgatccaccagaccaccacaccgagccccgagcccactaactcccaatccatcgcatcgccatccctgctgccatggctgtgcctccgcggtgggcgaacctcaacatcgacctggtgacggagatcatgaaccgcgtcccgtgcgcaatcgaccgcacgcggatggccgccgtctgtcaggcgtggctcgcggcggtcgcgcgggcagagcgtctgacatttcagctcccgtcgctccttttcccgcccgcggacgcgaatgacgtctactgctacctcagcggttgccgcgaacacaacatgttggccgggccccgctacttcggatcgtacgacgacggctggttcttcgtcgcctacggccacacttgcgggcatcggctgctcaacatccgcaccggagattcccacgcgctacccgacatcctcgtggatcacgtcgctcacgaaatacacagcatggtcatcctcgccgccgccatctcgtgcccgcctgagttcgcgccatgcgccgcgggcatcgtcagctaccagccggagctcgacgcgccgcgccg

SEQ ID NO: 41829 - protein, 161 aa, Zea mays subsp. mays
  peptide (1)..(161): Ceres Seq. ID no. 13624451
  misc_feature (6)..(159): NCBI GI NO: 34894448 NR Description: OSJNBa0025P13.19
  misc_feature (1)..(127): NCBI GI NO: 34909986 NR Description: P0490D09.17
  misc_feature (1)..(95): NCBI GI NO: 34909978 NR Description: P0490D09.13
  misc_feature (1)..(116): NCBI GI NO: 34909988 NR Description: P0490D09.18
  misc_feature (1)..(91): NCBI GI NO: 34909984 NR Description: P0490D09.16
  misc_feature (1)..(152): NCBI GI NO: 34911048 NR Description: P0007F06.19
MAVPPRWANLNIDLVTEIMNRVPCAIDRTRMAAVCQAWLAAVARAERLTFQLPSLLFPPADANDVYCYLSGCREHNMLAGPRYFGSYDDGWFFVAYGHTCGHRLLNIRTGDSHALPDILVDHVAHEIHSMVILAAAISCPPEFAPCAAGIVSYQPELDAPR

SEQ ID NO: 41830 - protein, 143 aa, Zea mays subsp. mays
  peptide (1)..(143): Ceres Seq. ID no. 13624452
  misc_feature (1)..(141): NCBI GI NO: 34894448 NR Description: OSJNBa0025P13.19
  misc_feature (1)..(109): NCBI GI NO: 34909986 NR Description: P0490D09.17
  misc_feature (1)..(77): NCBI GI NO: 34909978 NR Description: P0490D09.13
  misc_feature (1)..(98): NCBI GI NO: 34909988 NR Description: P0490D09.18
  misc_feature (1)..(73): NCBI GI NO: 34909984 NR Description: P0490D09.16
  misc_feature (1)..(134): NCBI GI NO: 34911048 NR Description: P0007F06.19
MNRVPCAIDRTRMAAVCQAWLAAVARAERLTFQLPSLLFPPADANDVYCYLSGCREHNMLAGPRYFGSYDDGWFFVAYGHTCGHRLLNIRTGDSHALPDILVDHVAHEIHSMVILAAAISCPPEFAPCAAGIVSYQPELDAPR

SEQ ID NO: 41831 - protein, 131 aa, Zea mays subsp. mays
  peptide (1)..(131): Ceres Seq. ID no. 13624453
  misc_feature (1)..(129): NCBI GI NO: 34894448 NR Description: OSJNBa0025P13.19
  misc_feature (1)..(97): NCBI GI NO: 34909986 NR Description: P0490D09.17
  misc_feature (1)..(65): NCBI GI NO: 34909978 NR Description: P0490D09.13
  misc_feature (1)..(86): NCBI GI NO: 34909988 NR Description: P0490D09.18
  misc_feature (1)..(61): NCBI GI NO: 34909984 NR Description: P0490D09.16
  misc_feature (1)..(122): NCBI GI NO: 34911048 NR Description: P0007F06.19
MAAVCQAWLAAVARAERLTFQLPSLLFPPADANDVYCYLSGCREHNMLAGPRYFGSYDDGWFFVAYGHTCGHRLLNIRTGDSHALPDILVDHVAHEIHSMVILAAAISCPPEFAPCAAGIVSYQPELDAPR

SEQ ID NO: 41832 - DNA, 1499 bp, Zea mays subsp. mays
  misc_feature (1)..(1499): Ceres Seq. ID no. 13622663
gcgatctcagctcccaaccaaccttcatcaatccagtaccatcggaagcgtacatgcatacataccatacgtccataccatacggccggaccacgcccagcaaccaatcaataatactcctagtccgccaccagtcgctccgcctcggcgccatcgcacggaaagcttgctgttgctggcgacctcgcggcggggcgccggagcagccatgcctataaaatccgggcgagagcacccacccattcgtaccctatcagccgcctcccctgcctccggtcctctcccgcctctctctctctcttgcacacacacgacgtcgtacgcggcagctagcagcacgcacgatcgatcgccacagcgtacgtactagcacagaggacgacgaccgacgccatggcggcctccttccgcgcggcggcgtggcagcggcggcggcgacggcgctggtgatggtggcggcggtgctggcggtgtcgtgggccggcgtggcccgcgcggacttcgcccaggaccgcgccatgtgcgcggaccggctgatggggctggcgacgtgcctgacgttcgtgcaggacaaggcgacggcgcgcgcgccgacgcccgactgctgcgcggggctcaagcaggtggtggccgccagcaagctgtgcatgtgcgtgctggtcaaggaccgcgacgagccggcgctggggttcaagatcaacgtcacccgcgccatggacctgccctcgctctgcagcaaccccgccaccttctccgactgccccaagatcctgggcatgtcgcccgacgcccccgaggcggagatcttcaaggagtacgcgaagaagcacgagagcaacaacggcaccaccattcctgccgctgcaaccggcgccgccgcggcgaccgggaagagcacgagcgcggcgccgacggcggacggcgccgggaggcagcccggcacggtcttcttctacgtcgtgtcggcgctgctcgtctccgtcgcggtcctgctgtgctgatggcttaacggccggccgcggcagcgcatgcattcatggccggccggccggcagggagatggaggtgctactgcacgctgcacgactggaaggaagcccggagacacaattcaagtctttgagatgagcaaactaaaggacacgagtactcttttttttttctctttcctgtagcctttttgtgtgtgtgtggcgtgttgtggggagtttgtgagacgtcggcttgtgctagtgctgacggtgcaccagcgacgcagctctgtacttcccagctgttgggctgtggccttccagcctggggattttaatgtggtggcccgggactgccgacctgtctgtctgaatctgatgattctgacccattatgttggcacttggcacattgtatgtttggtttctttggttttagttctcgtcttcttgcttttttttatttaaagtaatttctgtaagcaacatgatgcatgtaactagaaggacctttgtttgtatacgctc

SEQ ID NO: 41833 - protein, 183 aa, Zea mays subsp. mays
  peptide (1)..(183): Ceres Seq. ID no. 13622664
  misc_feature (25)..(104): Pfam Name: Pfam Description:  Protease inhibitor/seed storage/LTP family
  misc_feature (1)..(182): NCBI GI NO: 34394084 NR Description: lipid transfer protein-like
  misc_feature (1)..(165): NCBI GI NO: 15224862 NR Description: lipid transfer protein family
  misc_feature (1)..(161): NCBI GI NO: 15224863 NR Description: lipid transfer protein - related
  misc_feature (1)..(148): NCBI GI NO: 15231070 NR Description: protease inhibitor/seed storage/lipid transfer
  misc_feature (1)..(148): NCBI GI NO: 21555220 NR Description: unknown [Arabidopsis thaliana]
  misc_feature (1)..(178): NCBI GI NO: 18405294 NR Description: protease inhibitor/seed storage/lipid transfer
  misc_feature (12)..(178): NCBI GI NO: 21537387 NR Description: unknown [Arabidopsis thaliana]
  misc_feature (1)..(182): NCBI GI NO: 21553541 NR Description: lipid transfer protein, putative
  misc_feature (1)..(182): NCBI GI NO: 15217777 NR Description: lipid transfer protein - related
  misc_feature (1)..(156): NCBI GI NO: 15219578 NR Description: protease inhibitor/seed storage/lipid transfer
MVAAVLAVSWAGVARADFAQDRAMCADRLMGLATCLTFVQDKATARAPTPDCCAGLKQVVAASKLCMCVLVKDRDEPALGFKINVTRAMDLPSLCSNPATFSDCPKILGMSPDAPEAEIFKEYAKKHESNNGTTIPAAATGAAAATGKSTSAAPTADGAGRQPGTVFFYVVSALLVSVAVLLC

SEQ ID NO: 41834 - protein, 160 aa, Zea mays subsp. mays
  peptide (1)..(160): Ceres Seq. ID no. 13622665
  misc_feature (2)..(81): Pfam Name: Pfam Description:  Protease inhibitor/seed storage/LTP family
  misc_feature (1)..(159): NCBI GI NO: 34394084 NR Description: lipid transfer protein-like
  misc_feature (1)..(142): NCBI GI NO: 15224862 NR Description: lipid transfer protein family
  misc_feature (1)..(138): NCBI GI NO: 15224863 NR Description: lipid transfer protein - related
  misc_feature (1)..(125): NCBI GI NO: 15231070 NR Description: protease inhibitor/seed storage/lipid transfer
  misc_feature (1)..(125): NCBI GI NO: 21555220 NR Description: unknown [Arabidopsis thaliana]
  misc_feature (1)..(155): NCBI GI NO: 18405294 NR Description: protease inhibitor/seed storage/lipid transfer
  misc_feature (1)..(155): NCBI GI NO: 21537387 NR Description: unknown [Arabidopsis thaliana]
  misc_feature (1)..(159): NCBI GI NO: 21553541 NR Description: lipid transfer protein, putative
  misc_feature (1)..(159): NCBI GI NO: 15217777 NR Description: lipid transfer protein - related
  misc_feature (1)..(133): NCBI GI NO: 15219578 NR Description: protease inhibitor/seed storage/lipid transfer
MCADRLMGLATCLTFVQDKATARAPTPDCCAGLKQVVAASKLCMCVLVKDRDEPALGFKINVTRAMDLPSLCSNPATFSDCPKILGMSPDAPEAEIFKEYAKKHESNNGTTIPAAATGAAAATGKSTSAAPTADGAGRQPGTVFFYVVSALLVSVAVLLC

SEQ ID NO: 41835 - protein, 154 aa, Zea mays subsp. mays
  peptide (1)..(154): Ceres Seq. ID no. 13622666
  misc_feature (1)..(75): Pfam Name: Pfam Description:  Protease inhibitor/seed storage/LTP family
  misc_feature (1)..(153): NCBI GI NO: 34394084 NR Description: lipid transfer protein-like
  misc_feature (1)..(136): NCBI GI NO: 15224862 NR Description: lipid transfer protein family
  misc_feature (1)..(132): NCBI GI NO: 15224863 NR Description: lipid transfer protein - related
  misc_feature (1)..(119): NCBI GI NO: 15231070 NR Description: protease inhibitor/seed storage/lipid transfer
  misc_feature (1)..(119): NCBI GI NO: 21555220 NR Description: unknown [Arabidopsis thaliana]
  misc_feature (1)..(149): NCBI GI NO: 18405294 NR Description: protease inhibitor/seed storage/lipid transfer
  misc_feature (1)..(149): NCBI GI NO: 21537387 NR Description: unknown [Arabidopsis thaliana]
  misc_feature (1)..(153): NCBI GI NO: 21553541 NR Description: lipid transfer protein, putative
  misc_feature (1)..(153): NCBI GI NO: 15217777 NR Description: lipid transfer protein - related
  misc_feature (1)..(127): NCBI GI NO: 15219578 NR Description: protease inhibitor/seed storage/lipid transfer
MGLATCLTFVQDKATARAPTPDCCAGLKQVVAASKLCMCVLVKDRDEPALGFKINVTRAMDLPSLCSNPATFSDCPKILGMSPDAPEAEIFKEYAKKHESNNGTTIPAAATGAAAATGKSTSAAPTADGAGRQPGTVFFYVVSALLVSVAVLLC

SEQ ID NO: 41836 - DNA, 1463 bp, Zea mays subsp. mays
  misc_feature (1)..(1463): Ceres Seq. ID no. 12454872
aggtgcagtcagtcagtcaggcagagaaacgtgcggaggtggaagccacaacgggagcgcctaccctcgcagtccgcccctcgacctcggagccgcagcccgcgaggagcgttcacaatcacaccggccaccgcggaccctagcgctttagccttatccgtccgagcgcgcgcccgatgcagacggaggcgcgcgtgggcgtcgtcgtcgacggcggcgccgccgtgggccggtgccaggagcagcgccacatcggcacggcggcgcacctcgccgccggaggcttcgcgggcgccgtcagcaagacgtgcaccgcccccctcgcgcggctcaccatcctcttccaggtagctggtatgcattcagatgttgcgactctaaggaagtgtagcatatggcatgaggcttcacgaatttttcgagaagaagggattgaagccttttggaaaggaaatctagtgacaattgtacatcgcttgccttattctgccatcagcttctattcgtatgagcgctacaaaaatcttctccaaacggttcctggcctggatagagactcaaataatgttggtgttgtacgtttgcttggtggtggtttggcgggaataactgctgcatctttaacttacccgttggatgttgttcgtactcgcttggcgacgcagaaaaccactaggtattacaagggcatcttccatgcggtgtccacaatttgtagagacgagggtgtcaaaggattgtataaaggccttggggccacgttattgggagttggacctagtatagcaatcagcttttctgtctatgaatcactaaggtcttattggcaaatggaaaggccccatgattcaactgcagttgttagcttgttttctgggagtctatctggtattgcatcatctacagccacatttccccttgatcttgtaaagcgacggatgcaacttcaaggagcagctgggacagcgtccgtccagaaatcaaccatatctggaactgtccgtgatatcttgcagagagaaggtctccgtggcttctacagaggtatcgcccctgagtacctcaaggtcgttcctagtgttggaatcgccttcatgacatacgagacactgaagggcttgctctccagcattgacatagacgatgagagctgaggtttcccattatacgaagaggttaaacttcaccggattttttggccataggttaccatcagaatgtatgtaagtgcatcagagtggttacacgaacggcattgtggcagttttgtagttgacggtaggtcaaagcttacctgaggtgtacaactagtcttgtgttgtaccataggctaaacagagcaaataagcgcttcatgatggagtcttcatcttgtgttcctttgtacattatgctccatcaaggaagagcaaaaaaaaaaaaaaaagaagaagaagaaggtgaaagtcaatgattttataggt

SEQ ID NO: 41837 - protein, 325 aa, Zea mays subsp. mays
  peptide (1)..(325): Ceres Seq. ID no. 12454873
  misc_feature (1)..(325): NCBI GI NO: 34895726 NR Description: putative peroxisomal Ca-dependent solute carrierprotein
  misc_feature (23)..(323): NCBI GI NO: 34902034 NR Description: putative peroxisomal Ca-dependent solute carrierprotein
  misc_feature (1)..(313): NCBI GI NO: 15228163 NR Description: mitochondrial carrier protein family
  misc_feature (1)..(313): NCBI GI NO: 21554682 NR Description: Ca-dependent solute carrier-like protein
  misc_feature (21)..(319): NCBI GI NO: 22331775 NR Description: mitochondrial carrier protein family
  misc_feature (21)..(319): NCBI GI NO: 11277067 NR Description: hypothetical protein F5K20
  misc_feature (1)..(319): NCBI GI NO: 30687297 NR Description: mitochondrial carrier protein family
  misc_feature (1)..(319): NCBI GI NO: 25295875 NR Description: probable mitochondrial carrier protein
  misc_feature (32)..(316): NCBI GI NO: 33598954 NR Description: calcium-binding transporter [Homo sapiens]
  misc_feature (28)..(320): NCBI GI NO: 40739120 NR Description: hypothetical protein AN5801.2
MQTEARVGVVVDGGAAVGRCQEQRHIGTAAHLAAGGFAGAVSKTCTAPLARLTILFQVAGMHSDVATLRKCSIWHEASRIFREEGIEAFWKGNLVTIVHRLPYSAISFYSYERYKNLLQTVPGLDRDSNNVGVVRLLGGGLAGITAASLTYPLDVVRTRLATQKTTRYYKGIFHAVSTICRDEGVKGLYKGLGATLLGVGPSIAISFSVYESLRSYWQMERPHDSTAVVSLFSGSLSGIASSTATFPLDLVKRRMQLQGAAGTASVQKSTISGTVRDILQREGLRGFYRGIAPEYLKVVPSVGIAFMTYETLKGLLSSIDIDDES

SEQ ID NO: 41838 - protein, 265 aa, Zea mays subsp. mays
  peptide (1)..(265): Ceres Seq. ID no. 12454874
  misc_feature (1)..(265): NCBI GI NO: 34895726 NR Description: putative peroxisomal Ca-dependent solute carrierprotein
  misc_feature (1)..(263): NCBI GI NO: 34902034 NR Description: putative peroxisomal Ca-dependent solute carrierprotein
  misc_feature (1)..(253): NCBI GI NO: 15228163 NR Description: mitochondrial carrier protein family
  misc_feature (1)..(253): NCBI GI NO: 21554682 NR Description: Ca-dependent solute carrier-like protein
  misc_feature (1)..(259): NCBI GI NO: 22331775 NR Description: mitochondrial carrier protein family
  misc_feature (1)..(259): NCBI GI NO: 11277067 NR Description: hypothetical protein F5K20
  misc_feature (1)..(259): NCBI GI NO: 30687297 NR Description: mitochondrial carrier protein family
  misc_feature (1)..(259): NCBI GI NO: 25295875 NR Description: probable mitochondrial carrier protein
  misc_feature (1)..(256): NCBI GI NO: 33598954 NR Description: calcium-binding transporter [Homo sapiens]
  misc_feature (1)..(260): NCBI GI NO: 40739120 NR Description: hypothetical protein AN5801.2
MHSDVATLRKCSIWHEASRIFREEGIEAFWKGNLVTIVHRLPYSAISFYSYERYKNLLQTVPGLDRDSNNVGVVRLLGGGLAGITAASLTYPLDVVRTRLATQKTTRYYKGIFHAVSTICRDEGVKGLYKGLGATLLGVGPSIAISFSVYESLRSYWQMERPHDSTAVVSLFSGSLSGIASSTATFPLDLVKRRMQLQGAAGTASVQKSTISGTVRDILQREGLRGFYRGIAPEYLKVVPSVGIAFMTYETLKGLLSSIDIDDES

SEQ ID NO: 41839 - DNA, 2116 bp, Zea mays subsp. mays; identical to SEQ ID NO: 39957
  misc_feature (1)..(2116): Ceres Seq. ID no. 13566658
  misc_feature (1610)..(1610): n is a, c, t, g, unknown, or other

SEQ ID NO: 41840 - protein, 592 aa, Zea mays subsp. mays; identical to SEQ ID NO: 39958
  peptide (1)..(592): Ceres Seq. ID no. 13566659
  misc_feature (7)..(588): NCBI GI NO: 34897712 NR Description: ESTs AU082304
  misc_feature (7)..(589): NCBI GI NO: 27817921 NR Description: putative pectinesterase
  misc_feature (21)..(592): NCBI GI NO: 15234551 NR Description: pectinesterase (pectin methylesterase) family
  misc_feature (1)..(341): NCBI GI NO: 37535902 NR Description: putative ascorbate oxidase
  misc_feature (326)..(590): NCBI GI NO: 37535902 NR Description: putative ascorbate oxidase
  misc_feature (13)..(589): NCBI GI NO: 22328918 NR Description: pectinesterase (pectin methylesterase) family
  misc_feature (5)..(588): NCBI GI NO: 15242108 NR Description: pectinesterase (pectin methylesterase) family
  misc_feature (13)..(557): NCBI GI NO: 7433000 NR Description: pollen-specific protein homolog F24A6
  misc_feature (8)..(490): NCBI GI NO: 34893990 NR Description: putative pollen-specific protein homolog
  misc_feature (490)..(557): NCBI GI NO: 34893990 NR Description: putative pollen-specific protein homolog
  misc_feature (489)..(489): Xaa is any aa, unknown or other

SEQ ID NO: 41841 - protein, 535 aa, Zea mays subsp. mays; identical to SEQ ID NO: 39959
  peptide (1)..(535): Ceres Seq. ID no. 13566660
  misc_feature (1)..(531): NCBI GI NO: 34897712 NR Description: ESTs AU082304
  misc_feature (1)..(532): NCBI GI NO: 27817921 NR Description: putative pectinesterase
  misc_feature (1)..(535): NCBI GI NO: 15234551 NR Description: pectinesterase (pectin methylesterase) family
  misc_feature (1)..(284): NCBI GI NO: 37535902 NR Description: putative ascorbate oxidase
  misc_feature (269)..(533): NCBI GI NO: 37535902 NR Description: putative ascorbate oxidase
  misc_feature (1)..(532): NCBI GI NO: 22328918 NR Description: pectinesterase (pectin methylesterase) family
  misc_feature (1)..(531): NCBI GI NO: 15242108 NR Description: pectinesterase (pectin methylesterase) family
  misc_feature (1)..(500): NCBI GI NO: 7433000 NR Description: pollen-specific protein homolog F24A6
  misc_feature (1)..(433): NCBI GI NO: 34893990 NR Description: putative pollen-specific protein homolog
  misc_feature (433)..(500): NCBI GI NO: 34893990 NR Description: putative pollen-specific protein homolog
  misc_feature (432)..(432): Xaa is any aa, unknown or other

SEQ ID NO: 41842 - protein, 463 aa, Zea mays subsp. mays; identical to SEQ ID NO: 39960
  peptide (1)..(463): Ceres Seq. ID no. 13566661
  misc_feature (1)..(459): NCBI GI NO: 34897712 NR Description: ESTs AU082304
  misc_feature (1)..(460): NCBI GI NO: 27817921 NR Description: putative pectinesterase
  misc_feature (1)..(463): NCBI GI NO: 15234551 NR Description: pectinesterase (pectin methylesterase) family
  misc_feature (1)..(212): NCBI GI NO: 37535902 NR Description: putative ascorbate oxidase
  misc_feature (197)..(461): NCBI GI NO: 37535902 NR Description: putative ascorbate oxidase
  misc_feature (1)..(460): NCBI GI NO: 22328918 NR Description: pectinesterase (pectin methylesterase) family
  misc_feature (1)..(459): NCBI GI NO: 15242108 NR Description: pectinesterase (pectin methylesterase) family
  misc_feature (1)..(428): NCBI GI NO: 7433000 NR Description: pollen-specific protein homolog F24A6
  misc_feature (1)..(361): NCBI GI NO: 34893990 NR Description: putative pollen-specific protein homolog
  misc_feature (361)..(428): NCBI GI NO: 34893990 NR Description: putative pollen-specific protein homolog
  misc_feature (360)..(360): Xaa is any aa, unknown or other

SEQ ID NO: 41843 - DNA, 1402 bp, Zea mays subsp. mays; identical to SEQ ID NO: 33630
  misc_feature (1)..(1402): Ceres Seq. ID no. 13492514

SEQ ID NO: 41844 - protein, 243 aa, Zea mays subsp. mays; identical to SEQ ID NO: 33631
  peptide (1)..(243): Ceres Seq. ID no. 13492515
  misc_feature (165)..(242): Pfam Name: Pfam Description:  UBX domain
  misc_feature (34)..(242): NCBI GI NO: 13123657 NR Description: phosphatase-like protein Mtc923
  misc_feature (34)..(243): NCBI GI NO: 13123659 NR Description: phosphatase-like protein Psc923 [Pisum sativum]
  misc_feature (27)..(242): NCBI GI NO: 18412499 NR Description: membrane trafficking factor -related
  misc_feature (27)..(242): NCBI GI NO: 7487458 NR Description: hypothetical protein T27D20
  misc_feature (34)..(242): NCBI GI NO: 15234731 NR Description: expressed protein [Arabidopsis thaliana]
  misc_feature (25)..(242): NCBI GI NO: 18414442 NR Description: phosphatase like protein [Arabidopsis thaliana]
  misc_feature (25)..(242): NCBI GI NO: 15292665 NR Description: putative phosphatase [Arabidopsis thaliana]
  misc_feature (25)..(239): NCBI GI NO: 7485149 NR Description: hypothetical protein - Arabidopsis thaliana
  misc_feature (48)..(243): NCBI GI NO: 29568099 NR Description: p47 protein [Homo sapiens]
  misc_feature (61)..(243): NCBI GI NO: 20149635 NR Description: p47 protein [Homo sapiens]

SEQ ID NO: 41845 - protein, 242 aa, Zea mays subsp. mays; identical to SEQ ID NO: 33632
  peptide (1)..(242): Ceres Seq. ID no. 13492516
  misc_feature (164)..(241): Pfam Name: Pfam Description:  UBX domain
  misc_feature (33)..(241): NCBI GI NO: 13123657 NR Description: phosphatase-like protein Mtc923
  misc_feature (33)..(242): NCBI GI NO: 13123659 NR Description: phosphatase-like protein Psc923 [Pisum sativum]
  misc_feature (26)..(241): NCBI GI NO: 18412499 NR Description: membrane trafficking factor -related
  misc_feature (26)..(241): NCBI GI NO: 7487458 NR Description: hypothetical protein T27D20
  misc_feature (33)..(241): NCBI GI NO: 15234731 NR Description: expressed protein [Arabidopsis thaliana]
  misc_feature (24)..(241): NCBI GI NO: 18414442 NR Description: phosphatase like protein [Arabidopsis thaliana]
  misc_feature (24)..(241): NCBI GI NO: 15292665 NR Description: putative phosphatase [Arabidopsis thaliana]
  misc_feature (24)..(238): NCBI GI NO: 7485149 NR Description: hypothetical protein - Arabidopsis thaliana
  misc_feature (47)..(242): NCBI GI NO: 29568099 NR Description: p47 protein [Homo sapiens]
  misc_feature (60)..(242): NCBI GI NO: 20149635 NR Description: p47 protein [Homo sapiens]

SEQ ID NO: 41846 - protein, 240 aa, Zea mays subsp. mays; identical to SEQ ID NO: 33633
  peptide (1)..(240): Ceres Seq. ID no. 13492517
  misc_feature (162)..(239): Pfam Name: Pfam Description:  UBX domain
  misc_feature (31)..(239): NCBI GI NO: 13123657 NR Description: phosphatase-like protein Mtc923
  misc_feature (31)..(240): NCBI GI NO: 13123659 NR Description: phosphatase-like protein Psc923 [Pisum sativum]
  misc_feature (24)..(239): NCBI GI NO: 18412499 NR Description: membrane trafficking factor -related
  misc_feature (24)..(239): NCBI GI NO: 7487458 NR Description: hypothetical protein T27D20
  misc_feature (31)..(239): NCBI GI NO: 15234731 NR Description: expressed protein [Arabidopsis thaliana]
  misc_feature (22)..(239): NCBI GI NO: 18414442 NR Description: phosphatase like protein [Arabidopsis thaliana]
  misc_feature (22)..(239): NCBI GI NO: 15292665 NR Description: putative phosphatase [Arabidopsis thaliana]
  misc_feature (22)..(236): NCBI GI NO: 7485149 NR Description: hypothetical protein - Arabidopsis thaliana
  misc_feature (45)..(240): NCBI GI NO: 29568099 NR Description: p47 protein [Homo sapiens]
  misc_feature (58)..(240): NCBI GI NO: 20149635 NR Description: p47 protein [Homo sapiens]

SEQ ID NO: 41847 - DNA, 845 bp, Zea mays subsp. mays
  misc_feature (1)..(845): Ceres Seq. ID no. 12418375
gaagaagccgcgtgcgttatcctttgagcagtttgggcgctgagcaagtccagtgagagagggagagcggcgagaggatggctgggatggcatcgctgcagggcgccatggcgtcgctctccatctccgcgctaggcgcggcgacggcgagcagcagcagcttctggggcaaccggctcgccacctactccgcgccgcagcctggggtaaggtttatggtcaagatatgcccaattgaaatgagacttaagagatgggagcgaaagaagtgtaaaccaaacagtcttcctgtgctgcacaagatgcatgttaggatcggggacacggtacaggttattgcaggccgtgagaaaggaaaggttggagaagtcacacgccaaaaggtggatttagaaaaccttcgcttagccaagctgacaaatttcaagggccacgtaatgagatgcagctagtagcatttctgcttagacagtctagtagtctgaagaaactatttctgattgctcccaaggaggatcaccctcaaggactgcgcaaggttcagtcagatatgctgcctgattttcttaaaaaagaaatatcgcatctggaaagaccttcagcaaatacccagatatttttcggcgagcctgatgctcagacccacccgttgcattcggaggtctttgtcaggttttagcttgaaatgagcaaatgctgttgtagcccaattcctgctcatatagatttagatttctcgttagataacggacatggggaaaaaagtatctgcaaggcatacagagtttgatatatgtttcctcttttgcaattcatattactaaagaagtcctgcatagcagtcg

SEQ ID NO: 41848 - protein, 124 aa, Zea mays subsp. mays
  peptide (1)..(124): Ceres Seq. ID no. 12418376
  misc_feature (1)..(100): NCBI GI NO: 1694974 NR Description: plastid ribosomal protein [Arabidopsis thaliana]
  misc_feature (1)..(100): NCBI GI NO: 30696483 NR Description: 50S ribosomal protein L24, chloroplast precursor
  misc_feature (1)..(100): NCBI GI NO: 30696487 NR Description: 50S ribosomal protein L24, chloroplast precursor
  misc_feature (4)..(100): NCBI GI NO: 132819 NR Description: 50S RIBOSOMAL PROTEIN L24, CHLOROPLAST PRECURSOR
  misc_feature (11)..(99): NCBI GI NO: 400989 NR Description: 50S RIBOSOMAL PROTEIN L24, CHLOROPLAST PRECURSOR
  misc_feature (11)..(120): NCBI GI NO: 132821 NR Description: 50S RIBOSOMAL PROTEIN L24, CHLOROPLAST PRECURSOR
MAGMASLQGAMASLSISALGAATASSSSFWGNRLATYSAPQPGVRFMVKICPIEMRLKRWERKKCKPNSLPVLHKMHVRIGDTVQVIAGREKGKVGEVTRQKVDLENLRLAKLTNFKGHVMRCS

SEQ ID NO: 41849 - protein, 121 aa, Zea mays subsp. mays
  peptide (1)..(121): Ceres Seq. ID no. 12418377
  misc_feature (1)..(97): NCBI GI NO: 1694974 NR Description: plastid ribosomal protein [Arabidopsis thaliana]
  misc_feature (1)..(97): NCBI GI NO: 30696483 NR Description: 50S ribosomal protein L24, chloroplast precursor
  misc_feature (1)..(97): NCBI GI NO: 30696487 NR Description: 50S ribosomal protein L24, chloroplast precursor
  misc_feature (1)..(97): NCBI GI NO: 132819 NR Description: 50S RIBOSOMAL PROTEIN L24, CHLOROPLAST PRECURSOR
  misc_feature (8)..(96): NCBI GI NO: 400989 NR Description: 50S RIBOSOMAL PROTEIN L24, CHLOROPLAST PRECURSOR
  misc_feature (8)..(117): NCBI GI NO: 132821 NR Description: 50S RIBOSOMAL PROTEIN L24, CHLOROPLAST PRECURSOR
MASLQGAMASLSISALGAATASSSSFWGNRLATYSAPQPGVRFMVKICPIEMRLKRWERKKCKPNSLPVLHKMHVRIGDTVQVIAGREKGKVGEVTRQKVDLENLRLAKLTNFKGHVMRCS

SEQ ID NO: 41850 - protein, 114 aa, Zea mays subsp. mays
  peptide (1)..(114): Ceres Seq. ID no. 12418378
  misc_feature (1)..(90): NCBI GI NO: 1694974 NR Description: plastid ribosomal protein [Arabidopsis thaliana]
  misc_feature (1)..(90): NCBI GI NO: 30696483 NR Description: 50S ribosomal protein L24, chloroplast precursor
  misc_feature (1)..(90): NCBI GI NO: 30696487 NR Description: 50S ribosomal protein L24, chloroplast precursor
  misc_feature (1)..(90): NCBI GI NO: 132819 NR Description: 50S RIBOSOMAL PROTEIN L24, CHLOROPLAST PRECURSOR
  misc_feature (1)..(89): NCBI GI NO: 400989 NR Description: 50S RIBOSOMAL PROTEIN L24, CHLOROPLAST PRECURSOR
  misc_feature (1)..(110): NCBI GI NO: 132821 NR Description: 50S RIBOSOMAL PROTEIN L24, CHLOROPLAST PRECURSOR
MASLSISALGAATASSSSFWGNRLATYSAPQPGVRFMVKICPIEMRLKRWERKKCKPNSLPVLHKMHVRIGDTVQVIAGREKGKVGEVTRQKVDLENLRLAKLTNFKGHVMRCS

SEQ ID NO: 41851 - DNA, 1023 bp, Zea mays subsp. mays
  misc_feature (1)..(1023): Ceres Seq. ID no. 12378098
acaaccacaggcaacgcaacccccaaacccaaaaccctaccacggcgcccatggcttcgccgccgcctcctcctgcccggcaccccacctccgcagcaaccgccgctgcggcgggcaatggccacgacacctccgcagcaaccgccgctgcggcgggaaatagccacgccacctccgcttcgccggtggacgccctcttcctccagaacctcatgacccgcgtccagctccgcccgcccttcctcgacaccaactcattcctcacccaggaccttgacgacttcctcctcaacgagttcgccgcgctatccgccgctgcaggggcgtcggatgatgacgaagacgtggaggatgaggatggtgggctcgctggcggggagggctccggggaggcgaggcggcggcggatgctggcgagggaggaggcgaagctggagaaggagattgtgcggatggtgctggccggggaggccgaggacaagctcaagcccaattcgggccagtccgtggctgtcggcgaccaccacctctgcgtcggtttccacgacgatgccagcggggagtatcgcatctgggaatggcatggccacgtcatgctgttcgacgacgaggaaggatactccgcagagtacatttatggcaaccacttcgagccgctcgctgctgccacagccagggccaagaagaaggagaaggagatgagagagaaggaattgagcatgggtcttcgggatttggtcgtggacactgacgacggtggcaatgccaatcgctccaaggagaacggtagcagcggagggcccagggtagtgcgcaggaatgtcgtcaatggcccaaccacgcctgctaggtaatggctttctagagcttgcagtgtgcttggtggaagaagcagtgccgcagtgcatcaatctgtgtgacaaaaacaaataaagatctgttgtccttttctcgcttatagctgtttaagctgtctattgtattctgttgagaaatcaatcacatctatactttgcttctgct

SEQ ID NO: 41852 - protein, 283 aa, Zea mays subsp. mays
  peptide (1)..(283): Ceres Seq. ID no. 12378099
  misc_feature (126)..(255): NCBI GI NO: 11357797 NR Description: hypothetical protein F4P12
  misc_feature (126)..(255): NCBI GI NO: 22331772 NR Description: putative protein; protein id: At3g53630
NHRQRNPQTQNPTTAPMASPPPPPARHPTSAATAAAAGNGHDTSAATAAAAGNSHATSASPVDALFLQNLMTRVQLRPPFLDTNSFLTQDLDDFLLNEFAALSAAAGASDDDEDVEDEDGGLAGGEGSGEARRRRMLAREEAKLEKEIVRMVLAGEAEDKLKPNSGQSVAVGDHHLCVGFHDDASGEYRIWEWHGHVMLFDDEEGYSAEYIYGNHFEPLAAATARAKKKEKEMREKELSMGLRDLVVDTDDGGNANRSKENGSSGGPRVVRRNVVNGPTTPAR

SEQ ID NO: 41853 - protein, 267 aa, Zea mays subsp. mays
  peptide (1)..(267): Ceres Seq. ID no. 12378100
  misc_feature (110)..(239): NCBI GI NO: 11357797 NR Description: hypothetical protein F4P12
  misc_feature (110)..(239): NCBI GI NO: 22331772 NR Description: putative protein; protein id: At3g53630
MASPPPPPARHPTSAATAAAAGNGHDTSAATAAAAGNSHATSASPVDALFLQNLMTRVQLRPPFLDTNSFLTQDLDDFLLNEFAALSAAAGASDDDEDVEDEDGGLAGGEGSGEARRRRMLAREEAKLEKEIVRMVLAGEAEDKLKPNSGQSVAVGDHHLCVGFHDDASGEYRIWEWHGHVMLFDDEEGYSAEYIYGNHFEPLAAATARAKKKEKEMREKELSMGLRDLVVDTDDGGNANRSKENGSSGGPRVVRRNVVNGPTTPAR

SEQ ID NO: 41854 - protein, 213 aa, Zea mays subsp. mays
  peptide (1)..(213): Ceres Seq. ID no. 12378101
  misc_feature (56)..(185): NCBI GI NO: 11357797 NR Description: hypothetical protein F4P12
  misc_feature (56)..(185): NCBI GI NO: 22331772 NR Description: putative protein; protein id: At3g53630
MTRVQLRPPFLDTNSFLTQDLDDFLLNEFAALSAAAGASDDDEDVEDEDGGLAGGEGSGEARRRRMLAREEAKLEKEIVRMVLAGEAEDKLKPNSGQSVAVGDHHLCVGFHDDASGEYRIWEWHGHVMLFDDEEGYSAEYIYGNHFEPLAAATARAKKKEKEMREKELSMGLRDLVVDTDDGGNANRSKENGSSGGPRVVRRNVVNGPTTPAR

SEQ ID NO: 41855 - DNA, 975 bp, Zea mays subsp. mays
  misc_feature (1)..(975): Ceres Seq. ID no. 14305221
ataaaggggcattggcttgggatcacctctgcatctcgcctgggatctgctagcttgatctctcctagtcctagcccattcgcttctcctgttcgtcgctcttaatttgcttgctcgatccctggcagtggcagctgctgcaatggcttccggtggcgcgtcgtcactggccttggccgcgctgctcctcgtgagctgcgcctcggcggcggtggcgaccaagtacaccgtcggggacgcgtccggctggacgaccaccggcgactacgccacctgggccagcggcaagaagttcaaagtcggcgacagtctcgagttcaaatacgccggcggggcgcacacggtggacgaggtgagcgcggcggactacgccgcctgctcctccagcaacgcgctcagcaccgacagcgccggcgccacgaccgtgaccctcaagacggccggcaagcactacttcatctgcggcgtggcgggccattgcagcagcggcatgaagctcgcggtggacgtggccaaggcggtgaccgccccggcgccggccccagccgcggccccggccccggccgcggacacagccccagatgcccccgacaccacgccgtcgaccccgacgtccccctcgagctccggcggccgcacgcccaagagcccagacacgacggtcctgtcgccgccggacaagaagtccacctcctccggcgccaccgggctcagcgccgcggcgtgggccggcttgggcctggccgggctcgtggccgtgcacctcggcgcgttctaggccagcccgctggcctggccagggaggagacagtgccgtgtgttgttgttaggctgcacgtcatggattggattggtgtattggttgagggacttgactgcttaccagagagagatctcttttggttcagggaactgtgctgtagacctgtagttggataccttggatgttatgctatcagttttgctgttgttatc

SEQ ID NO: 41856 - protein, 211 aa, Zea mays subsp. mays
  peptide (1)..(211): Ceres Seq. ID no. 14305222
  misc_feature (36)..(117): Pfam Name: Pfam Description:  Plastocyanin-like domain
  misc_feature (6)..(170): NCBI GI NO: 2493318 NR Description: Blue copper protein precursor
  misc_feature (5)..(206): NCBI GI NO: 14140127 NR Description: uclacyanin 3-like protein [Oryza sativa]
  misc_feature (1)..(200): NCBI GI NO: 21554060 NR Description: phytocyanin [Arabidopsis thaliana]
  misc_feature (1)..(200): NCBI GI NO: 15224960 NR Description: uclacyanin II [Arabidopsis thaliana]
  misc_feature (1)..(200): NCBI GI NO: 25453522 NR Description: blue copper-binding protein II
  misc_feature (7)..(186): NCBI GI NO: 15232289 NR Description: uclacyanin 3 [Arabidopsis thaliana]
  misc_feature (11)..(166): NCBI GI NO: 38346158 NR Description: OSJNBa0079A21.5
  misc_feature (1)..(200): NCBI GI NO: 25453521 NR Description: blue copper-binding protein II
  misc_feature (9)..(165): NCBI GI NO: 38636761 NR Description: putative blue copper binding protein
  misc_feature (11)..(203): NCBI GI NO: 34915492 NR Description: contains ESTsD24614
MASGGASSLALAALLLVSCASAAVATKYTVGDASGWTTTGDYATWASGKKFKVGDSLEFKYAGGAHTVDEVSAADYAACSSSNALSTDSAGATTVTLKTAGKHYFICGVAGHCSSGMKLAVDVAKAVTAPAPAPAAAPAPAADTAPDAPDTTPSTPTSPSSSGGRTPKSPDTTVLSPPDKKSTSSGATGLSAAAWAGLGLAGLVAVHLGAF

SEQ ID NO: 41857 - DNA, 488 bp, Zea mays subsp. mays
  misc_feature (1)..(488): Ceres Seq. ID no. 2789959
acgggcacgaccatctcctacacccgcgggcaaaagttccctgtcccccgtacacattccaccccaaaatggcactcgcgccatcacccccagcgctgccgcccaacccggcgctccctttgccgtggtgggggcgggccggccgcggtgcgctcgtccgcgcccgcgcccgcgccgtccgcgcggcgctacggccccgagccagtggtccgtcgggagctggcggggccgcccggcgcagcagcwgcccgagtacccggacaaggcggacctggaagacgtgctgcggacggtgggaacgttcccgcccatcgtcttcgccggcgaggcgcgcaccctcgaggagcgcctcgcggaggccgccgtcggccgggccttcctcctccagggcggcgactgcgccgagagcttcaaggagttcaacgccaacaacatcagggacacttccgcgtcctcctgcaaatgtccgttgtgctcatgttcggagg

SEQ ID NO: 41858 - protein, 162 aa, Zea mays subsp. mays
  peptide (1)..(162): Ceres Seq. ID no. 2789960
  misc_feature (68)..(148): Pfam Name: Pfam Description:  Class-II DAHP synthetase family
  misc_feature (60)..(148): NCBI GI NO: 584778 NR Description: Phospho-2-dehydro-3-deoxyheptonate aldolase 2
  misc_feature (32)..(148): NCBI GI NO: 37536912 NR Description: putative 3-deoxy-D-arabino-heptulosonate 7-phosphate synthase
  misc_feature (60)..(148): NCBI GI NO: 100437 NR Description: cystathionine gamma-lyase (EC 4.4.1.1) - potato
  misc_feature (60)..(148): NCBI GI NO: 584777 NR Description: Phospho-2-dehydro-3-deoxyheptonate aldolase 1
  misc_feature (60)..(148): NCBI GI NO: 24745903 NR Description: 3-deoxy-D-arabino-heptulosonate 7-phosphatesynthase
  misc_feature (2)..(148): NCBI GI NO: 34906844 NR Description: putative phospho-2-dehydro-3-deoxyheptonatealdolase 1
  misc_feature (20)..(148): NCBI GI NO: 2398679 NR Description: 3-deoxy-D-arabino-heptulosonate 7-phosphatesynthase
  misc_feature (67)..(148): NCBI GI NO: 114193 NR Description: Phospho-2-dehydro-3-deoxyheptonate aldolase 1
  misc_feature (54)..(148): NCBI GI NO: 2398681 NR Description: 3-deoxy-D-arabino-heptulosonate 7-phosphatesynthase
  misc_feature (57)..(148): NCBI GI NO: 166690 NR Description: 3-deoxy-D-arabino-heptulosonate 7-phosphatesynthase
  misc_feature (82)..(82): Xaa is any aa, unknown or other
RARPSPTPAGKSSLSPVHIPPQNGTRAITPSAAAQPGAPFAVVGAGRPRCARPRPRPRRPRGATAPSQWSVGSWRGRPAQQXPEYPDKADLEDVLRTVGTFPPIVFAGEARTLEERLAEAAVGRAFLLQGGDCAESFKEFNANNIRDTSASSCKCPLCSCSE

SEQ ID NO: 41859 - protein, 162 aa, Zea mays subsp. mays
  peptide (1)..(162): Ceres Seq. ID no. 2789961
  misc_feature (48)..(151): Pfam Name: Pfam Description:  Cupin
  misc_feature (8)..(149): NCBI GI NO: 31204361 NR Description: ENSANGP00000004749 [Anopheles gambiae]
  misc_feature (82)..(82): Xaa is any aa, unknown or other
GHDHLLHPRAKVPCPPYTFHPKMALAPSPPALPPNPALPLPWWGRAGRGALVRARARAVRAALRPRASGPSGAGGAARRSSXPSTRTRRTWKTCCGRWERSRPSSSPARRAPSRSASRRPPSAGPSSSRAATAPRASRSSTPTTSGTLPRPPANVRCAHVRR

SEQ ID NO: 41860 - protein, 162 aa, Zea mays subsp. mays
  peptide (1)..(162): Ceres Seq. ID no. 2789962
  misc_feature (82)..(82): Xaa is any aa, unknown or other
TGTTISYTRGQKFPVPRTHSTPKWHSRHHPQRCRPTRRSLCRGGGGPAAVRSSAPAPAPSARRYGPEPVVRRELAGPPGAAXARVPGQGGPGRRAADGGNVPAHRLRRRGAHPRGAPRGGRRRPGLPPPGRRLRRELQGVQRQQHQGHFRVLLQMSVVLMFG

SEQ ID NO: 41861 - DNA, 931 bp, Zea mays subsp. mays; identical to SEQ ID NO: 38410
  misc_feature (1)..(931): Ceres Seq. ID no. 12354601

SEQ ID NO: 41862 - protein, 310 aa, Zea mays subsp. mays; identical to SEQ ID NO: 38411
  peptide (1)..(310): Ceres Seq. ID no. 12354602
  misc_feature (12)..(309): NCBI GI NO: 34902476 NR Description: Putative cytochrome P450
  misc_feature (51)..(306): NCBI GI NO: 15228981 NR Description: cytochrome P450, putative; protein id: At3g56630.1
  misc_feature (51)..(306): NCBI GI NO: 15218671 NR Description: cytochrome p450, putative; protein id: At1g34540.1
  misc_feature (11)..(308): NCBI GI NO: 34909022 NR Description: cytochrome P450-like protein
  misc_feature (23)..(308): NCBI GI NO: 34909030 NR Description: cytochrome P450-like protein
  misc_feature (51)..(308): NCBI GI NO: 34909016 NR Description: cytochrome P450-like protein
  misc_feature (51)..(308): NCBI GI NO: 34909018 NR Description: cytochrome P450-like protein
  misc_feature (16)..(309): NCBI GI NO: 18000068 NR Description: cytochrome P450-dependent fatty acid hydroxylase
  misc_feature (26)..(309): NCBI GI NO: 18000070 NR Description: cytochrome P450-dependent fatty acid hydroxylase
  misc_feature (51)..(303): NCBI GI NO: 34909024 NR Description: cytochrome P450-like protein

SEQ ID NO: 41863 - protein, 299 aa, Zea mays subsp. mays; identical to SEQ ID NO: 38412
  peptide (1)..(299): Ceres Seq. ID no. 12354603
  misc_feature (1)..(298): NCBI GI NO: 34902476 NR Description: Putative cytochrome P450
  misc_feature (40)..(295): NCBI GI NO: 15228981 NR Description: cytochrome P450, putative; protein id: At3g56630.1
  misc_feature (40)..(295): NCBI GI NO: 15218671 NR Description: cytochrome p450, putative; protein id: At1g34540.1
  misc_feature (1)..(297): NCBI GI NO: 34909022 NR Description: cytochrome P450-like protein
  misc_feature (12)..(297): NCBI GI NO: 34909030 NR Description: cytochrome P450-like protein
  misc_feature (40)..(297): NCBI GI NO: 34909016 NR Description: cytochrome P450-like protein
  misc_feature (40)..(297): NCBI GI NO: 34909018 NR Description: cytochrome P450-like protein
  misc_feature (5)..(298): NCBI GI NO: 18000068 NR Description: cytochrome P450-dependent fatty acid hydroxylase
  misc_feature (15)..(298): NCBI GI NO: 18000070 NR Description: cytochrome P450-dependent fatty acid hydroxylase
  misc_feature (40)..(292): NCBI GI NO: 34909024 NR Description: cytochrome P450-like protein

SEQ ID NO: 41864 - protein, 236 aa, Zea mays subsp. mays; identical to SEQ ID NO: 38413
  peptide (1)..(236): Ceres Seq. ID no. 12354604
  misc_feature (1)..(235): NCBI GI NO: 34902476 NR Description: Putative cytochrome P450
  misc_feature (1)..(232): NCBI GI NO: 15228981 NR Description: cytochrome P450, putative; protein id: At3g56630.1
  misc_feature (1)..(232): NCBI GI NO: 15218671 NR Description: cytochrome p450, putative; protein id: At1g34540.1
  misc_feature (1)..(234): NCBI GI NO: 34909022 NR Description: cytochrome P450-like protein
  misc_feature (1)..(234): NCBI GI NO: 34909030 NR Description: cytochrome P450-like protein
  misc_feature (1)..(234): NCBI GI NO: 34909016 NR Description: cytochrome P450-like protein
  misc_feature (1)..(234): NCBI GI NO: 34909018 NR Description: cytochrome P450-like protein
  misc_feature (1)..(235): NCBI GI NO: 18000068 NR Description: cytochrome P450-dependent fatty acid hydroxylase
  misc_feature (1)..(235): NCBI GI NO: 18000070 NR Description: cytochrome P450-dependent fatty acid hydroxylase
  misc_feature (1)..(229): NCBI GI NO: 34909024 NR Description: cytochrome P450-like protein

SEQ ID NO: 41865 - DNA, 1239 bp, Zea mays subsp. mays; identical to SEQ ID NO: 34285
  misc_feature (1)..(1239): Ceres Seq. ID no. 12364583

SEQ ID NO: 41866 - protein, 130 aa, Zea mays subsp. mays; identical to SEQ ID NO: 34286
  peptide (1)..(130): Ceres Seq. ID no. 12364584
  misc_feature (1)..(90): Pfam Name: Pfam Description:  Ras family
  misc_feature (1)..(130): NCBI GI NO: 38175435 NR Description: putative ras-related protein
  misc_feature (1)..(130): NCBI GI NO: 18447917 NR Description: ras-related protein RAB8-3 [Nicotiana tabacum]
  misc_feature (1)..(130): NCBI GI NO: 15231322 NR Description: GTP-binding protein ara-3; protein id: At3g46060
  misc_feature (1)..(130): NCBI GI NO: 1370190 NR Description: RAB8A [Lotus japonicus]
  misc_feature (1)..(130): NCBI GI NO: 18447921 NR Description: ras-related protein RAB8-5 [Nicotiana tabacum]
  misc_feature (1)..(130): NCBI GI NO: 18447913 NR Description: ras-related protein RAB8-1 [Nicotiana tabacum]
  misc_feature (1)..(130): NCBI GI NO: 5669640 NR Description: ethylene-responsive small GTP-binding protein
  misc_feature (1)..(130): NCBI GI NO: 1362066 NR Description: GTP-binding protein GTP6 - garden pea
  misc_feature (1)..(129): NCBI GI NO: 15232784 NR Description: Ras family GTP-binding protein, putative
  misc_feature (1)..(130): NCBI GI NO: 33146687 NR Description: putative ethylene-responsive small GTP-bindingprotein

SEQ ID NO: 41867 - protein, 92 aa, Zea mays subsp. mays; identical to SEQ ID NO: 34287
  peptide (1)..(92): Ceres Seq. ID no. 12364585

SEQ ID NO: 41868 - protein, 87 aa, Zea mays subsp. mays; identical to SEQ ID NO: 34288
  peptide (1)..(87): Ceres Seq. ID no. 12364586
  misc_feature (1)..(87): NCBI GI NO: 38175435 NR Description: putative ras-related protein
  misc_feature (1)..(87): NCBI GI NO: 18447917 NR Description: ras-related protein RAB8-3 [Nicotiana tabacum]
  misc_feature (1)..(87): NCBI GI NO: 15231322 NR Description: GTP-binding protein ara-3; protein id: At3g46060
  misc_feature (1)..(87): NCBI GI NO: 1370190 NR Description: RAB8A [Lotus japonicus]
  misc_feature (1)..(87): NCBI GI NO: 18447921 NR Description: ras-related protein RAB8-5 [Nicotiana tabacum]
  misc_feature (1)..(87): NCBI GI NO: 18447913 NR Description: ras-related protein RAB8-1 [Nicotiana tabacum]
  misc_feature (1)..(87): NCBI GI NO: 5669640 NR Description: ethylene-responsive small GTP-binding protein
  misc_feature (1)..(87): NCBI GI NO: 1362066 NR Description: GTP-binding protein GTP6 - garden pea
  misc_feature (1)..(86): NCBI GI NO: 15232784 NR Description: Ras family GTP-binding protein, putative
  misc_feature (1)..(87): NCBI GI NO: 33146687 NR Description: putative ethylene-responsive small GTP-bindingprotein

SEQ ID NO: 41869 - DNA, 407 bp, Zea mays subsp. mays
  misc_feature (1)..(407): Ceres Seq. ID no. 2787041
aaaaaatcaatcgcccacaaaggagagccaggcagccagccaaatcttccacctcctccatttccagccccgtccccacaccagctcgcgtaacctcctgcccatggctggaggcggcggcgcaggcgcgggctcgtcgtccggcggcggcggagggggcggcagggagggcgactgggactgcggcagctgcggcaaccgcaactacgccttccgctcgctctgcaaccgctgcaagcagccgcgcctcctcgtcgaccccaacaccccgcgcgactccaagtggctaccccgcgccggggactggatctgcaccggttgcagtaacaataattatgcatccagaaagaactgcaaaaagtgtggcttgcccaaggaggaagcagcaatgccagcattgcaaatgg

SEQ ID NO: 41870 - protein, 135 aa, Zea mays subsp. mays
  peptide (1)..(135): Ceres Seq. ID no. 2787042
  misc_feature (55)..(84): Pfam Name: Pfam Description:  Zn-finger in Ran binding protein and others
  misc_feature (52)..(133): NCBI GI NO: 15227939 NR Description: similar to putative zinc finger protein
  misc_feature (38)..(128): NCBI GI NO: 15865325 NR Description: putative non-ribosomal nucleolar protein
  misc_feature (29)..(82): NCBI GI NO: 31242039 NR Description: ENSANGP00000022179 [Anopheles gambiae]
  misc_feature (55)..(134): NCBI GI NO: 34913970 NR Description: B1110C07.23
  misc_feature (33)..(131): NCBI GI NO: 27817857 NR Description: OJ1081_B12.5
  misc_feature (37)..(82): NCBI GI NO: 8928004 NR Description: RNA-binding protein cabeza
  misc_feature (37)..(82): NCBI GI NO: 24642436 NR Description: cabeza CG3606-PB
  misc_feature (37)..(82): NCBI GI NO: 24642434 NR Description: cabeza CG3606-PA
  misc_feature (38)..(82): NCBI GI NO: 31242041 NR Description: ENSANGP00000022825 [Anopheles gambiae]
  misc_feature (37)..(82): NCBI GI NO: 908756 NR Description: unknown protein
KNQSPTKESQAASQIFHLLHFQPRPHTSSRNLLPMAGGGGAGAGSSSGGGGGGGREGDWDCGSCGNRNYAFRSLCNRCKQPRLLVDPNTPRDSKWLPRAGDWICTGCSNNNYASRKNCKKCGLPKEEAAMPALQM

SEQ ID NO: 41871 - protein, 135 aa, Zea mays subsp. mays
  peptide (1)..(135): Ceres Seq. ID no. 2787043
  misc_feature (18)..(118): Pfam Name: Pfam Description:  Glycoprotein GG/GX
  misc_feature (9)..(124): NCBI GI NO: 11360494 NR Description: antifreeze glycopeptide AFGP polyprotein precursor
  misc_feature (8)..(126): NCBI GI NO: 11360494 NR Description: antifreeze glycopeptide AFGP polyprotein precursor
  misc_feature (8)..(126): NCBI GI NO: 11360494 NR Description: antifreeze glycopeptide AFGP polyprotein precursor
KINRPQRRARQPAKSSTSSISSPVPTPARVTSCPWLEAAAQARARRPAAAEGAAGRATGTAAAAATATTPSARSATAASSRASSSTPTPRATPSGYPAPGTGSAPVAVTIIMHPERTAKSVACPRRKQQCQHCKW

SEQ ID NO: 41872 - protein, 101 aa, Zea mays subsp. mays
  peptide (1)..(101): Ceres Seq. ID no. 2787044
  misc_feature (21)..(50): Pfam Name: Pfam Description:  Zn-finger in Ran binding protein and others
  misc_feature (18)..(99): NCBI GI NO: 15227939 NR Description: similar to putative zinc finger protein
  misc_feature (4)..(94): NCBI GI NO: 15865325 NR Description: putative non-ribosomal nucleolar protein
  misc_feature (1)..(48): NCBI GI NO: 31242039 NR Description: ENSANGP00000022179 [Anopheles gambiae]
  misc_feature (21)..(100): NCBI GI NO: 34913970 NR Description: B1110C07.23
  misc_feature (1)..(97): NCBI GI NO: 27817857 NR Description: OJ1081_B12.5
  misc_feature (3)..(48): NCBI GI NO: 8928004 NR Description: RNA-binding protein cabeza
  misc_feature (3)..(48): NCBI GI NO: 24642434 NR Description: cabeza CG3606-PA
  misc_feature (3)..(48): NCBI GI NO: 24642436 NR Description: cabeza CG3606-PB
  misc_feature (4)..(48): NCBI GI NO: 31242041 NR Description: ENSANGP00000022825 [Anopheles gambiae]
  misc_feature (3)..(48): NCBI GI NO: 908756 NR Description: unknown protein
MAGGGGAGAGSSSGGGGGGGREGDWDCGSCGNRNYAFRSLCNRCKQPRLLVDPNTPRDSKWLPRAGDWICTGCSNNNYASRKNCKKCGLPKEEAAMPALQM

SEQ ID NO: 41873 - DNA, 1694 bp, Zea mays subsp. mays
  misc_feature (1)..(1694): Ceres Seq. ID no. 12435649
aaccacgcaccagcagcagcgaggagctagagcagcggcagagcgcgcggcgcacaccacgcatcgtacgtcctagctcacgatggcgggcgcctggtccttgctcgcgctcgccctatcgctctgctccgtcgcggccgtcgcggtgcagcaggtgaacacggtggccgcggcgcagcaggcggcggaccgggtggcggggctcccggggcagccgcccgtggggttcgcgcagtacgccggctacgtgaccgtgaacgagacgcacggccgcgcgctcttctactggttcttcgaggccaccgcgtcgcccgacaagaagccgctcgtgctctggctcaacggcgggcccgggtgctcgtcgattgggtacggggaggcggaggagctgggtcccttcctggtgcagaagggcaagccggagctcagatggaacaactactcctggaacacagaggccaaccttatgttcctggagtccccggtgggcgtcggcttctcctacacaaacacgagctccgacctgctgcaactcggcgacaagatcaccgctgacgacgcttacaagttcctgctcaactggttcaagaggttcccgcagtacaggtcccacgacttctacatcgccggcgagagctacgccgggcactacgtcccgcagctgtcggagaagatcttcgacggcaacagggcggggcccaaggagagctacgtcaacctcaagggcctgatggtcgggaacgcgctcatggacgacgagacggaccagacgggcatggtcgactacgcctgggaccacgccgtcatctccgaccgggtgtacgccgacgtcaaggccaggtgcgacttcagcatggccaacgtcaccgacgcctgcaacgccgcgctccaggagtacttcgccgtgtaccgcctcatcgacatgtacagcctctacaccccggtctgcaccgacgacccggccggcgcgtcggcgttgccgtcctcctacgacgcgcgcggccaccggaaggtcgccgtccacggcgccgcccccaggatcttctccaaataccgaggatggatcatgaagccggcgggctacgacccctgcacggcggagtacgcggagacctacttcaaccggcccgacgtccaggcggcgctgcacgcgaacgtgaccaagatcggctacaactggacgcactgcagcgatgtgatcaacacttggaacgacgccgccttctccaccctccccaccatccgcaagctcgtcgccagcggcctcagggtgtgggtcttcagcggcgacaccgacgggaggatccccgtgacgtccacgaggctcaccctcaacaagctagggctcaagaccatccaggagtggacgccgtggtacgaccatctgcaggttggtggatggacggtcgtctatgagggcctgacgttcgtcaccatccgcggagccggacacgaggtgcctctgcacgcgccacggcaggcgctgacgctcttcagcaacttcctggcaggcaccaagatgcctccaacggcgttcccctagtttcaaaagaatttaaaaaaggtgcctcctcttgcccggcaaagccggctgatatgtttctttccccccttctcgcttctactaaagttgtaagtgtaattcgattggaaaaaagttcagaataaaagtcatagtgctgacctcaatgctc

SEQ ID NO: 41874 - protein, 486 aa, Zea mays subsp. mays
  peptide (1)..(486): Ceres Seq. ID no. 12435650
  misc_feature (28)..(485): NCBI GI NO: 10177810 NR Description: serine carboxypeptidase II-like protein
  misc_feature (90)..(485): NCBI GI NO: 30688865 NR Description: serine carboxypeptidase -related
  misc_feature (6)..(445): NCBI GI NO: 38344436 NR Description: OSJNBa0038O10.8
  misc_feature (428)..(481): NCBI GI NO: 38344436 NR Description: OSJNBa0038O10.8
  misc_feature (6)..(289): NCBI GI NO: 37536528 NR Description: putative serine carboxypeptidase
  misc_feature (331)..(485): NCBI GI NO: 37536528 NR Description: putative serine carboxypeptidase
  misc_feature (5)..(485): NCBI GI NO: 15241571 NR Description: serine-type carboxypeptidase II-like protein
  misc_feature (33)..(289): NCBI GI NO: 10140766 NR Description: putative serine carboxypeptidase [Oryza sativa]
  misc_feature (331)..(485): NCBI GI NO: 10140766 NR Description: putative serine carboxypeptidase [Oryza sativa]
  misc_feature (38)..(289): NCBI GI NO: 15224083 NR Description: putative serine carboxypeptidase II
MAGAWSLLALALSLCSVAAVAVQQVNTVAAAQQAADRVAGLPGQPPVGFAQYAGYVTVNETHGRALFYWFFEATASPDKKPLVLWLNGGPGCSSIGYGEAEELGPFLVQKGKPELRWNNYSWNTEANLMFLESPVGVGFSYTNTSSDLLQLGDKITADDAYKFLLNWFKRFPQYRSHDFYIAGESYAGHYVPQLSEKIFDGNRAGPKESYVNLKGLMVGNALMDDETDQTGMVDYAWDHAVISDRVYADVKARCDFSMANVTDACNAALQEYFAVYRLIDMYSLYTPVCTDDPAGASALPSSYDARGHRKVAVHGAAPRIFSKYRGWIMKPAGYDPCTAEYAETYFNRPDVQAALHANVTKIGYNWTHCSDVINTWNDAAFSTLPTIRKLVASGLRVWVFSGDTDGRIPVTSTRLTLNKLGLKTIQEWTPWYDHLQVGGWTVVYEGLTFVTIRGAGHEVPLHAPRQALTLFSNFLAGTKMPPTAFP

SEQ ID NO: 41875 - protein, 358 aa, Zea mays subsp. mays
  peptide (1)..(358): Ceres Seq. ID no. 12435651
  misc_feature (1)..(357): NCBI GI NO: 10177810 NR Description: serine carboxypeptidase II-like protein
  misc_feature (1)..(357): NCBI GI NO: 30688865 NR Description: serine carboxypeptidase -related
  misc_feature (1)..(317): NCBI GI NO: 38344436 NR Description: OSJNBa0038O10.8
  misc_feature (300)..(353): NCBI GI NO: 38344436 NR Description: OSJNBa0038O10.8
  misc_feature (1)..(161): NCBI GI NO: 37536528 NR Description: putative serine carboxypeptidase
  misc_feature (203)..(357): NCBI GI NO: 37536528 NR Description: putative serine carboxypeptidase
  misc_feature (1)..(357): NCBI GI NO: 15241571 NR Description: serine-type carboxypeptidase II-like protein
  misc_feature (1)..(161): NCBI GI NO: 10140766 NR Description: putative serine carboxypeptidase [Oryza sativa]
  misc_feature (203)..(357): NCBI GI NO: 10140766 NR Description: putative serine carboxypeptidase [Oryza sativa]
  misc_feature (1)..(161): NCBI GI NO: 15224083 NR Description: putative serine carboxypeptidase II
MFLESPVGVGFSYTNTSSDLLQLGDKITADDAYKFLLNWFKRFPQYRSHDFYIAGESYAGHYVPQLSEKIFDGNRAGPKESYVNLKGLMVGNALMDDETDQTGMVDYAWDHAVISDRVYADVKARCDFSMANVTDACNAALQEYFAVYRLIDMYSLYTPVCTDDPAGASALPSSYDARGHRKVAVHGAAPRIFSKYRGWIMKPAGYDPCTAEYAETYFNRPDVQAALHANVTKIGYNWTHCSDVINTWNDAAFSTLPTIRKLVASGLRVWVFSGDTDGRIPVTSTRLTLNKLGLKTIQEWTPWYDHLQVGGWTVVYEGLTFVTIRGAGHEVPLHAPRQALTLFSNFLAGTKMPPTAFP

SEQ ID NO: 41876 - protein, 270 aa, Zea mays subsp. mays
  peptide (1)..(270): Ceres Seq. ID no. 12435652
  misc_feature (1)..(269): NCBI GI NO: 10177810 NR Description: serine carboxypeptidase II-like protein
  misc_feature (1)..(269): NCBI GI NO: 30688865 NR Description: serine carboxypeptidase -related
  misc_feature (1)..(229): NCBI GI NO: 38344436 NR Description: OSJNBa0038O10.8
  misc_feature (212)..(265): NCBI GI NO: 38344436 NR Description: OSJNBa0038O10.8
  misc_feature (1)..(73): NCBI GI NO: 37536528 NR Description: putative serine carboxypeptidase
  misc_feature (115)..(269): NCBI GI NO: 37536528 NR Description: putative serine carboxypeptidase
  misc_feature (1)..(269): NCBI GI NO: 15241571 NR Description: serine-type carboxypeptidase II-like protein
  misc_feature (1)..(73): NCBI GI NO: 10140766 NR Description: putative serine carboxypeptidase [Oryza sativa]
  misc_feature (115)..(269): NCBI GI NO: 10140766 NR Description: putative serine carboxypeptidase [Oryza sativa]
  misc_feature (1)..(73): NCBI GI NO: 15224083 NR Description: putative serine carboxypeptidase II
MVGNALMDDETDQTGMVDYAWDHAVISDRVYADVKARCDFSMANVTDACNAALQEYFAVYRLIDMYSLYTPVCTDDPAGASALPSSYDARGHRKVAVHGAAPRIFSKYRGWIMKPAGYDPCTAEYAETYFNRPDVQAALHANVTKIGYNWTHCSDVINTWNDAAFSTLPTIRKLVASGLRVWVFSGDTDGRIPVTSTRLTLNKLGLKTIQEWTPWYDHLQVGGWTVVYEGLTFVTIRGAGHEVPLHAPRQALTLFSNFLAGTKMPPTAFP

SEQ ID NO: 41877 - DNA, 1415 bp, Zea mays subsp. mays
  misc_feature (1)..(1415): Ceres Seq. ID no. 12435621
tcgaaaaacccccacgccccaccccaccaaacaatggcgccggcggcgacttccacagcctctgcgccctcctccttccactccaccggtaggcatagggccagggtcggggcccggccatcgctcgtctctctccgcgtcagagcagccaatcccaacgttaccgccgatcccgcaccggccttccagtccgtcacggccttcgcgccagccaccgtcgccaacctcggcccgggcttcgacttcctcggatgcgccgtcgccgacgcctccctctccctgggtgacaccgtcaccgcaaccctggacccgtcactcccgcccgccaccgtctccatcgcctccgtcacatccccgtcccgccccaacctcgccgagcgcctctctagggacccgctccgcaactgcgcgggcgtcgccgccatcgccgcgctccgcgccctcggcgtccgctcccacgccgtgtccatccacctcaccaagggcctgccgctcggctcggggctcggctcctccgcggcctccgccgccgccgccgccaaggccgtcgacgccctcttcggctcgcgcctcggccgcgacgacctcgtcctcgcggggctcgagtcggagaaggccgtcagcggcttccacgccgacaacatcgcccccgccatcctcggcggcttcgtcctcgtccgcagctacgacccctttcacctcgtcccgctttccttcccgccagcgctccgcctccacttcgtcctggtcacccccgacttcgaggcgcccacgagcaagatgcgcgccgcgctgcccaggcaggtcgacgtccagcagcacgtgcgcaactccagccaggcagcggcgctcgtggcggcggtgctgcagggggacgcgggcctcatcggctccgcgatgtcgtccgacggcatcgtggagcccaccagggcacccctcatacctggcatggcggccgtaaaggcggcggccctgcaagctggagcgctgggctgcacaattagcggcgcgggccccacagtggtggccgtcatccaaggggaggaaaggggggaggaggttgcccgcaggatggtggacgcgttctggagcgcaggcaagctcaaggcgacagcaaccgtcgcgcagctcgatacccttggtgccagggtcatcgccacgtcatccttgaactagcaaaagattcggaaagtggtactgcaattgtatcaccaaacaaggaagaatgaaggggaaccccatggatttgtatgttttctcttctttcttgcatctttaggtggttaattggctttggaataagtgagatggaggacatcgctagaacaattctgttccgtgggctgtaatttcaatttgggctggtttcttcatcatgccatggataattatgaataaatttgaggtagtttgtt

SEQ ID NO: 41878 - protein, 391 aa, Zea mays subsp. mays
  peptide (1)..(391): Ceres Seq. ID no. 12435622
  misc_feature (12)..(389): NCBI GI NO: 15227800 NR Description: 3-hydroxy-3-methylglutaryl-coenzyme A reductase 2
  misc_feature (12)..(389): NCBI GI NO: 39104572 NR Description: putative homoserine kinase HSK
  misc_feature (12)..(389): NCBI GI NO: 4927412 NR Description: homoserine kinase [Arabidopsis thaliana]
  misc_feature (64)..(385): NCBI GI NO: 23136657 NR Description: hypothetical protein [Cytophaga hutchinsonii]
  misc_feature (63)..(389): NCBI GI NO: 21674844 NR Description: homoserine kinase [Chlorobium tepidum TLS]
  misc_feature (131)..(360): NCBI GI NO: 20093771 NR Description: Homoserine kinase [Methanopyrus kandleri AV19]
  misc_feature (64)..(87): NCBI GI NO: 20093771 NR Description: Homoserine kinase [Methanopyrus kandleri AV19]
  misc_feature (135)..(366): NCBI GI NO: 18977426 NR Description: homoserine kinase [Pyrococcus furiosus DSM 3638]
  misc_feature (68)..(87): NCBI GI NO: 18977426 NR Description: homoserine kinase [Pyrococcus furiosus DSM 3638]
  misc_feature (59)..(361): NCBI GI NO: 14194907 NR Description: HOMOSERINE KINASE (HK)
SKNPHAPPHQTMAPAATSTASAPSSFHSTGRHRARVGARPSLVSLRVRAANPNVTADPAPAFQSVTAFAPATVANLGPGFDFLGCAVADASLSLGDTVTATLDPSLPPATVSIASVTSPSRPNLAERLSRDPLRNCAGVAAIAALRALGVRSHAVSIHLTKGLPLGSGLGSSAASAAAAAKAVDALFGSRLGRDDLVLAGLESEKAVSGFHADNIAPAILGGFVLVRSYDPFHLVPLSFPPALRLHFVLVTPDFEAPTSKMRAALPRQVDVQQHVRNSSQAAALVAAVLQGDAGLIGSAMSSDGIVEPTRAPLIPGMAAVKAAALQAGALGCTISGAGPTVVAVIQGEERGEEVARRMVDAFWSAGKLKATATVAQLDTLGARVIATSSLN

SEQ ID NO: 41879 - protein, 380 aa, Zea mays subsp. mays
  peptide (1)..(380): Ceres Seq. ID no. 12435623
  misc_feature (1)..(378): NCBI GI NO: 15227800 NR Description: 3-hydroxy-3-methylglutaryl-coenzyme A reductase 2
  misc_feature (1)..(378): NCBI GI NO: 39104572 NR Description: putative homoserine kinase HSK
  misc_feature (1)..(378): NCBI GI NO: 4927412 NR Description: homoserine kinase [Arabidopsis thaliana]
  misc_feature (53)..(374): NCBI GI NO: 23136657 NR Description: hypothetical protein [Cytophaga hutchinsonii]
  misc_feature (52)..(378): NCBI GI NO: 21674844 NR Description: homoserine kinase [Chlorobium tepidum TLS]
  misc_feature (120)..(349): NCBI GI NO: 20093771 NR Description: Homoserine kinase [Methanopyrus kandleri AV19]
  misc_feature (53)..(76): NCBI GI NO: 20093771 NR Description: Homoserine kinase [Methanopyrus kandleri AV19]
  misc_feature (124)..(355): NCBI GI NO: 18977426 NR Description: homoserine kinase [Pyrococcus furiosus DSM 3638]
  misc_feature (57)..(76): NCBI GI NO: 18977426 NR Description: homoserine kinase [Pyrococcus furiosus DSM 3638]
  misc_feature (48)..(350): NCBI GI NO: 14194907 NR Description: HOMOSERINE KINASE (HK)
MAPAATSTASAPSSFHSTGRHRARVGARPSLVSLRVRAANPNVTADPAPAFQSVTAFAPATVANLGPGFDFLGCAVADASLSLGDTVTATLDPSLPPATVSIASVTSPSRPNLAERLSRDPLRNCAGVAAIAALRALGVRSHAVSIHLTKGLPLGSGLGSSAASAAAAAKAVDALFGSRLGRDDLVLAGLESEKAVSGFHADNIAPAILGGFVLVRSYDPFHLVPLSFPPALRLHFVLVTPDFEAPTSKMRAALPRQVDVQQHVRNSSQAAALVAAVLQGDAGLIGSAMSSDGIVEPTRAPLIPGMAAVKAAALQAGALGCTISGAGPTVVAVIQGEERGEEVARRMVDAFWSAGKLKATATVAQLDTLGARVIATSSLN

SEQ ID NO: 41880 - protein, 319 aa, Zea mays subsp. mays
  peptide (1)..(319): Ceres Seq. ID no. 12435624
  misc_feature (4)..(304): Pfam Name: Pfam Description:  Formin Homology 2 Domain
  misc_feature (18)..(319): NCBI GI NO: 20138131 NR Description: Vegetative cell wall protein gp1 precursor
  misc_feature (18)..(279): NCBI GI NO: 20138131 NR Description: Vegetative cell wall protein gp1 precursor
  misc_feature (18)..(266): NCBI GI NO: 6523547 NR Description: hydroxyproline-rich glycoprotein DZ-HRGP
  misc_feature (4)..(279): NCBI GI NO: 20138131 NR Description: Vegetative cell wall protein gp1 precursor
  misc_feature (18)..(279): NCBI GI NO: 20138131 NR Description: Vegetative cell wall protein gp1 precursor
  misc_feature (4)..(319): NCBI GI NO: 6523547 NR Description: hydroxyproline-rich glycoprotein DZ-HRGP
  misc_feature (18)..(313): NCBI GI NO: 20138131 NR Description: Vegetative cell wall protein gp1 precursor
  misc_feature (4)..(263): NCBI GI NO: 20138131 NR Description: Vegetative cell wall protein gp1 precursor
  misc_feature (18)..(313): NCBI GI NO: 20138131 NR Description: Vegetative cell wall protein gp1 precursor
  misc_feature (18)..(272): NCBI GI NO: 20138131 NR Description: Vegetative cell wall protein gp1 precursor
RKTPTPHPTKQWRRRRLPQPLRPPPSTPPVGIGPGSGPGHRSSLSASEQPIPTLPPIPHRPSSPSRPSRQPPSPTSARASTSSDAPSPTPPSPWVTPSPQPWTRHSRPPPSPSPPSHPRPAPTSPSASLGTRSATARASPPSPRSAPSASAPTPCPSTSPRACRSARGSAPPRPPPPPPPRPSTPSSARASAATTSSSRGSSRRRPSAASTPTTSPPPSSAASSSSAATTPFTSSRFPSRQRSASTSSWSPPTSRRPRARCAPRCPGRSTSSSTCATPARQRRSWRRCCRGTRASSAPRCRPTASWSPPGHPSYLAWRP

SEQ ID NO: 41881 - DNA, 2177 bp, Zea mays subsp. mays; identical to SEQ ID NO: 38477
  misc_feature (1)..(2177): Ceres Seq. ID no. 13492553

SEQ ID NO: 41882 - protein, 394 aa, Zea mays subsp. mays; identical to SEQ ID NO: 38478
  peptide (1)..(394): Ceres Seq. ID no. 13492554
  misc_feature (31)..(349): Pfam Name: Pfam Description:  Glycosyl hydrolases family 17
  misc_feature (26)..(369): NCBI GI NO: 18401187 NR Description: glycosyl hydrolase family 17
  misc_feature (26)..(369): NCBI GI NO: 21618052 NR Description: putative beta-1,3-glucanase [Arabidopsis thaliana]
  misc_feature (26)..(366): NCBI GI NO: 7447981 NR Description: probable beta-1,3-glucanase At2g26600
  misc_feature (13)..(389): NCBI GI NO: 15232696 NR Description: glycosyl hydrolase family 17
  misc_feature (26)..(389): NCBI GI NO: 11994352 NR Description: beta-1,3-glucanase-like protein
  misc_feature (29)..(362): NCBI GI NO: 15209173 NR Description: putative elicitor inducible chitinase
  misc_feature (92)..(369): NCBI GI NO: 26452328 NR Description: putative beta-1,3-glucanase [Arabidopsis thaliana]
  misc_feature (30)..(366): NCBI GI NO: 18401444 NR Description: glycosyl hydrolase family 17
  misc_feature (30)..(366): NCBI GI NO: 25316425 NR Description: probable beta-1,3-glucanase
  misc_feature (92)..(369): NCBI GI NO: 30683187 NR Description: glycosyl hydrolase family 17

SEQ ID NO: 41883 - protein, 390 aa, Zea mays subsp. mays; identical to SEQ ID NO: 38479
  peptide (1)..(390): Ceres Seq. ID no. 13492555
  misc_feature (27)..(345): Pfam Name: Pfam Description:  Glycosyl hydrolases family 17
  misc_feature (22)..(365): NCBI GI NO: 18401187 NR Description: glycosyl hydrolase family 17
  misc_feature (22)..(365): NCBI GI NO: 21618052 NR Description: putative beta-1,3-glucanase [Arabidopsis thaliana]
  misc_feature (22)..(362): NCBI GI NO: 7447981 NR Description: probable beta-1,3-glucanase At2g26600
  misc_feature (9)..(385): NCBI GI NO: 15232696 NR Description: glycosyl hydrolase family 17
  misc_feature (22)..(385): NCBI GI NO: 11994352 NR Description: beta-1,3-glucanase-like protein
  misc_feature (25)..(358): NCBI GI NO: 15209173 NR Description: putative elicitor inducible chitinase
  misc_feature (88)..(365): NCBI GI NO: 26452328 NR Description: putative beta-1,3-glucanase [Arabidopsis thaliana]
  misc_feature (26)..(362): NCBI GI NO: 18401444 NR Description: glycosyl hydrolase family 17
  misc_feature (26)..(362): NCBI GI NO: 25316425 NR Description: probable beta-1,3-glucanase
  misc_feature (88)..(365): NCBI GI NO: 30683187 NR Description: glycosyl hydrolase family 17

SEQ ID NO: 41884 - protein, 303 aa, Zea mays subsp. mays; identical to SEQ ID NO: 38480
  peptide (1)..(303): Ceres Seq. ID no. 13492556
  misc_feature (1)..(258): Pfam Name: Pfam Description:  Glycosyl hydrolases family 17
  misc_feature (1)..(278): NCBI GI NO: 18401187 NR Description: glycosyl hydrolase family 17
  misc_feature (1)..(278): NCBI GI NO: 21618052 NR Description: putative beta-1,3-glucanase [Arabidopsis thaliana]
  misc_feature (1)..(275): NCBI GI NO: 7447981 NR Description: probable beta-1,3-glucanase At2g26600
  misc_feature (1)..(298): NCBI GI NO: 15232696 NR Description: glycosyl hydrolase family 17
  misc_feature (1)..(298): NCBI GI NO: 11994352 NR Description: beta-1,3-glucanase-like protein
  misc_feature (1)..(271): NCBI GI NO: 15209173 NR Description: putative elicitor inducible chitinase
  misc_feature (1)..(278): NCBI GI NO: 26452328 NR Description: putative beta-1,3-glucanase [Arabidopsis thaliana]
  misc_feature (1)..(275): NCBI GI NO: 18401444 NR Description: glycosyl hydrolase family 17
  misc_feature (1)..(275): NCBI GI NO: 25316425 NR Description: probable beta-1,3-glucanase
  misc_feature (1)..(278): NCBI GI NO: 30683187 NR Description: glycosyl hydrolase family 17

SEQ ID NO: 41885 - DNA, 476 bp, Zea mays subsp. mays
  misc_feature (1)..(476): Ceres Seq. ID no. 11028215
  misc_feature (134)..(134): n is a, c, t, g, unknown, or other
aatatttttagccgcttttcggttggtggtgcctggcatctaccgtgcggagggggaagagggagaggccaggagaggaaagcctgcagccaccatggattccgacctctggatctcgcgtctcacggccgccnggcggcagtttgcgctgcagcgcgcgcagcgccagcacgccgccccggcatcccatcacgatcgatttgggtatgatgatatcgaacctgaggatgatttgcactcagacttcccatgcccttactgttatgaagatcatgatgttgcttctctctgcgcccatttggaggacgagcaccctttcgagtctaaaattgtgaaacatcaaagagtacgcagagttactggtaatggcaaccacaatctctcctatgcagggagagatcttcaactgcaagagacctacttaaaggtgcttcttggaaatagcagtcgaagcagcagtacaatgcatcaagtac

SEQ ID NO: 41886 - protein, 158 aa, Zea mays subsp. mays
  peptide (1)..(158): Ceres Seq. ID no. 11028216
  misc_feature (32)..(109): NCBI GI NO: 25992529 NR Description: fiber protein Fb2 [Gossypium barbadense]
  misc_feature (32)..(109): NCBI GI NO: 15240426 NR Description: drought-induced protein - like
  misc_feature (32)..(109): NCBI GI NO: 15230036 NR Description: unknown protein; protein id: At3g05700.1
  misc_feature (32)..(109): NCBI GI NO: 28393233 NR Description: unknown protein [Arabidopsis thaliana]
  misc_feature (68)..(109): NCBI GI NO: 15230782 NR Description: unknown protein; protein id: At3g06760.1
  misc_feature (68)..(109): NCBI GI NO: 18377875 NR Description: AT3g06760/F3E22_10 [Arabidopsis thaliana]
  misc_feature (32)..(117): NCBI GI NO: 15217855 NR Description: hypothetical protein; protein id: At1g02750.1
  misc_feature (32)..(141): NCBI GI NO: 26452595 NR Description: unknown protein [Arabidopsis thaliana]
  misc_feature (68)..(109): NCBI GI NO: 1076316 NR Description: drought-induced protein Di19
  misc_feature (68)..(109): NCBI GI NO: 15028023 NR Description: unknown protein [Arabidopsis thaliana]
  misc_feature (45)..(45): Xaa is any aa, unknown or other
IFLAAFRLVVPGIYRAEGEEGEARRGKPAATMDSDLWISRLTAAXRQFALQRAQRQHAAPASHHDRFGYDDIEPEDDLHSDFPCPYCYEDHDVASLCAHLEDEHPFESKIVKHQRVRRVTGNGNHNLSYAGRDLQLQETYLKVLLGNSSRSSSTMHQV

SEQ ID NO: 41887 - protein, 127 aa, Zea mays subsp. mays
  peptide (1)..(127): Ceres Seq. ID no. 11028217
  misc_feature (1)..(78): NCBI GI NO: 25992529 NR Description: fiber protein Fb2 [Gossypium barbadense]
  misc_feature (1)..(78): NCBI GI NO: 15240426 NR Description: drought-induced protein - like
  misc_feature (1)..(78): NCBI GI NO: 15230036 NR Description: unknown protein; protein id: At3g05700.1
  misc_feature (1)..(78): NCBI GI NO: 28393233 NR Description: unknown protein [Arabidopsis thaliana]
  misc_feature (37)..(78): NCBI GI NO: 15230782 NR Description: unknown protein; protein id: At3g06760.1
  misc_feature (37)..(78): NCBI GI NO: 18377875 NR Description: AT3g06760/F3E22_10 [Arabidopsis thaliana]
  misc_feature (1)..(86): NCBI GI NO: 15217855 NR Description: hypothetical protein; protein id: At1g02750.1
  misc_feature (1)..(110): NCBI GI NO: 26452595 NR Description: unknown protein [Arabidopsis thaliana]
  misc_feature (37)..(78): NCBI GI NO: 1076316 NR Description: drought-induced protein Di19
  misc_feature (37)..(78): NCBI GI NO: 15028023 NR Description: unknown protein [Arabidopsis thaliana]
  misc_feature (14)..(14): Xaa is any aa, unknown or other
MDSDLWISRLTAAXRQFALQRAQRQHAAPASHHDRFGYDDIEPEDDLHSDFPCPYCYEDHDVASLCAHLEDEHPFESKIVKHQRVRRVTGNGNHNLSYAGRDLQLQETYLKVLLGNSSRSSSTMHQV

SEQ ID NO: 41888 - DNA, 1466 bp, Zea mays subsp. mays; identical to SEQ ID NO: 27821
  misc_feature (1)..(1466): Ceres Seq. ID no. 13577847
  misc_feature (1394)..(1394): n is a, c, t, g, unknown, or other
  misc_feature (1373)..(1373): n is a, c, t, g, unknown, or other
  misc_feature (1191)..(1191): n is a, c, t, g, unknown, or other

SEQ ID NO: 41889 - protein, 393 aa, Zea mays subsp. mays; identical to SEQ ID NO: 27822
  peptide (1)..(393): Ceres Seq. ID no. 13577848
  misc_feature (98)..(254): Pfam Name: Pfam Description:  TCP family transcription factor
  misc_feature (44)..(393): NCBI GI NO: 7489534 NR Description: probable DNA binding protein PCF2 - rice
  misc_feature (85)..(359): NCBI GI NO: 15225538 NR Description: TCP family transcription factor, putative
  misc_feature (81)..(276): NCBI GI NO: 15242216 NR Description: TCP family transcription factor, putative
  misc_feature (94)..(276): NCBI GI NO: 21592496 NR Description: unknown [Arabidopsis thaliana]
  misc_feature (98)..(391): NCBI GI NO: 15219640 NR Description: TCP family transcription factor, putative
  misc_feature (96)..(358): NCBI GI NO: 15218305 NR Description: TCP family transcription factor, putative
  misc_feature (102)..(258): NCBI GI NO: 18409345 NR Description: TCP family transcription factor, putative
  misc_feature (103)..(212): NCBI GI NO: 5731257 NR Description: auxin-induced basic helix-loop-helix transcriptionfactor
  misc_feature (97)..(237): NCBI GI NO: 15237274 NR Description: TCP family transcription factor, putative
  misc_feature (97)..(237): NCBI GI NO: 26452377 NR Description: unknown protein [Arabidopsis thaliana]

SEQ ID NO: 41890 - protein, 350 aa, Zea mays subsp. mays; identical to SEQ ID NO: 27823
  peptide (1)..(350): Ceres Seq. ID no. 13577849
  misc_feature (55)..(211): Pfam Name: Pfam Description:  TCP family transcription factor
  misc_feature (1)..(350): NCBI GI NO: 7489534 NR Description: probable DNA binding protein PCF2 - rice
  misc_feature (42)..(316): NCBI GI NO: 15225538 NR Description: TCP family transcription factor, putative
  misc_feature (38)..(233): NCBI GI NO: 15242216 NR Description: TCP family transcription factor, putative
  misc_feature (51)..(233): NCBI GI NO: 21592496 NR Description: unknown [Arabidopsis thaliana]
  misc_feature (55)..(348): NCBI GI NO: 15219640 NR Description: TCP family transcription factor, putative
  misc_feature (53)..(315): NCBI GI NO: 15218305 NR Description: TCP family transcription factor, putative
  misc_feature (59)..(215): NCBI GI NO: 18409345 NR Description: TCP family transcription factor, putative
  misc_feature (60)..(169): NCBI GI NO: 5731257 NR Description: auxin-induced basic helix-loop-helix transcriptionfactor
  misc_feature (54)..(194): NCBI GI NO: 15237274 NR Description: TCP family transcription factor, putative
  misc_feature (54)..(194): NCBI GI NO: 26452377 NR Description: unknown protein [Arabidopsis thaliana]

SEQ ID NO: 41891 - protein, 322 aa, Zea mays subsp. mays; identical to SEQ ID NO: 27824
  peptide (1)..(322): Ceres Seq. ID no. 13577850
  misc_feature (27)..(183): Pfam Name: Pfam Description:  TCP family transcription factor
  misc_feature (1)..(322): NCBI GI NO: 7489534 NR Description: probable DNA binding protein PCF2 - rice
  misc_feature (14)..(288): NCBI GI NO: 15225538 NR Description: TCP family transcription factor, putative
  misc_feature (10)..(205): NCBI GI NO: 15242216 NR Description: TCP family transcription factor, putative
  misc_feature (23)..(205): NCBI GI NO: 21592496 NR Description: unknown [Arabidopsis thaliana]
  misc_feature (27)..(320): NCBI GI NO: 15219640 NR Description: TCP family transcription factor, putative
  misc_feature (25)..(287): NCBI GI NO: 15218305 NR Description: TCP family transcription factor, putative
  misc_feature (31)..(187): NCBI GI NO: 18409345 NR Description: TCP family transcription factor, putative
  misc_feature (32)..(141): NCBI GI NO: 5731257 NR Description: auxin-induced basic helix-loop-helix transcriptionfactor
  misc_feature (26)..(166): NCBI GI NO: 15237274 NR Description: TCP family transcription factor, putative
  misc_feature (26)..(166): NCBI GI NO: 26452377 NR Description: unknown protein [Arabidopsis thaliana]

SEQ ID NO: 41892 - DNA, 1520 bp, Zea mays subsp. mays
  misc_feature (1)..(1520): Ceres Seq. ID no. 12378208
gcacgagaccattacctagaacatcctaatcgaaaagttccgtttcggtccgtcctccggtaacgcgctcgcctgctccgcttggctcatggattttcctccagggagcctccaatcgtggggtccaggtcgatgaggcggccctctccgctgaatctggcgatggtccgcggcggcagtcgccgatcaaacaccgtcaaaactttgcaggcccctggggcgtccacttccggtgccgagagcagcgccgtggagatgggcaccgagaagtccgaagtgtacagcactaacatgacgcaggctatgggagcagcgttgacatatagacatgaactcgggatgaactacaatttcatacgcccagacttgattgtaggatcctgcttacagagtccacttgatgttgataagcttcggaagattggtgtcaaaactgtattctgcttgcagcaagattcagatcttgaatattttggagtcgacatccgtgccattcaagattattctctacaattcaaagatattgtgcactgccgtgcggaaattagggattttgatgcttttgatttgcgattgaggcttcctgctgtggttagcaaattgcacaaacttatcaactgtaatggtggtgtaacatatatacattgtactgctggacttggaagagctcctgctgttgcattggcttatatgttctggattcttgggtacagtctcaatgaaggacatcggctgctacagagtaaaagggctttgctttccgaagttggaagccattaagttggcaactgctgacattcttgacaggattatccaaaaacacaatcactttgaagtgggaagctgatggttcttcctctgttgaaatttctgggctcgacattggctggggtcagagaattcctttgacatatgatgaggagaaaggagcttggtttcttgagaaagagttgcctgaaggacggtatgaatacaaatacgtagtggatggcaaatggctatgcaacgagcatgagctgataacgaaaccgaatgctgacggccacgtgaacaactatgttcaggtctccagagacggcacgagcgatgaagagaaggagcttagggagcggttgactggtcgggaccctgatctcacggaccaggagaggctgatgatcagagagtacttggaacagtacgcggatgccgccgagcgctaggagaagaatgatgatgactgaggaagagaagagacacaccatgagacgacggaccgaagccgacctgaccgcaccttcctttacggagaggtcgggcttcccctctcttgtcaatcaaatactcgtagcttaaccgtgcaaaagggcacgttctgctcgcatacttggagaatgatgatgaaggagcaaactgtacgtattgttgaacagcagctgtgcagaaataacaaaggtagtagcgtaaaactactgtactgaccataatgttactactgtatgctccttcttggctatgaataataataataataataaaag

SEQ ID NO: 41893 - protein, 215 aa, Zea mays subsp. mays
  peptide (1)..(215): Ceres Seq. ID no. 12378209
  misc_feature (138)..(209): Pfam Name: Pfam Description:  Dual specificity phosphatase, catalytic domain
  misc_feature (33)..(207): NCBI GI NO: 14970762 NR Description: protein tyrosine phosphatase
  misc_feature (1)..(207): NCBI GI NO: 18409505 NR Description: putative protein; protein id: At3g52180
  misc_feature (1)..(207): NCBI GI NO: 21536905 NR Description: unknown [Arabidopsis thaliana]
  misc_feature (1)..(207): NCBI GI NO: 16612246 NR Description: AT3g52180/F4F15_290 [Arabidopsis thaliana]
  misc_feature (1)..(207): NCBI GI NO: 11288831 NR Description: hypothetical protein F4F15
  misc_feature (11)..(60): NCBI GI NO: 34902388 NR Description: Unknown protein
  misc_feature (184)..(207): NCBI GI NO: 34902388 NR Description: Unknown protein
  misc_feature (113)..(207): NCBI GI NO: 11544661 NR Description: PTPKIS1 (truncated form) [Arabidopsis thaliana]
  misc_feature (1)..(206): NCBI GI NO: 21592631 NR Description: unknown [Arabidopsis thaliana]
  misc_feature (37)..(206): NCBI GI NO: 18399058 NR Description: expressed protein; protein id: At3g10940
MRRPSPLNLAMVRGGSRRSNTVKTLQAPGASTSGAESSAVEMGTEKSEVYSTNMTQAMGAALTYRHELGMNYNFIRPDLIVGSCLQSPLDVDKLRKIGVKTVFCLQQDSDLEYFGVDIRAIQDYSLQFKDIVHCRAEIRDFDAFDLRLRLPAVVSKLHKLINCNGGVTYIHCTAGLGRAPAVALAYMFWILGYSLNEGHRLLQSKRALLSEVGSH

SEQ ID NO: 41894 - protein, 205 aa, Zea mays subsp. mays
  peptide (1)..(205): Ceres Seq. ID no. 12378210
  misc_feature (128)..(199): Pfam Name: Pfam Description:  Dual specificity phosphatase, catalytic domain
  misc_feature (23)..(197): NCBI GI NO: 14970762 NR Description: protein tyrosine phosphatase
  misc_feature (1)..(197): NCBI GI NO: 18409505 NR Description: putative protein; protein id: At3g52180
  misc_feature (1)..(197): NCBI GI NO: 21536905 NR Description: unknown [Arabidopsis thaliana]
  misc_feature (1)..(197): NCBI GI NO: 16612246 NR Description: AT3g52180/F4F15_290 [Arabidopsis thaliana]
  misc_feature (1)..(197): NCBI GI NO: 11288831 NR Description: hypothetical protein F4F15
  misc_feature (1)..(50): NCBI GI NO: 34902388 NR Description: Unknown protein
  misc_feature (174)..(197): NCBI GI NO: 34902388 NR Description: Unknown protein
  misc_feature (103)..(197): NCBI GI NO: 11544661 NR Description: PTPKIS1 (truncated form) [Arabidopsis thaliana]
  misc_feature (1)..(196): NCBI GI NO: 21592631 NR Description: unknown [Arabidopsis thaliana]
  misc_feature (27)..(196): NCBI GI NO: 18399058 NR Description: expressed protein; protein id: At3g10940
MVRGGSRRSNTVKTLQAPGASTSGAESSAVEMGTEKSEVYSTNMTQAMGAALTYRHELGMNYNFIRPDLIVGSCLQSPLDVDKLRKIGVKTVFCLQQDSDLEYFGVDIRAIQDYSLQFKDIVHCRAEIRDFDAFDLRLRLPAVVSKLHKLINCNGGVTYIHCTAGLGRAPAVALAYMFWILGYSLNEGHRLLQSKRALLSEVGSH

SEQ ID NO: 41895 - protein, 174 aa, Zea mays subsp. mays
  peptide (1)..(174): Ceres Seq. ID no. 12378211
  misc_feature (97)..(168): Pfam Name: Pfam Description:  Dual specificity phosphatase, catalytic domain
  misc_feature (1)..(166): NCBI GI NO: 14970762 NR Description: protein tyrosine phosphatase
  misc_feature (1)..(166): NCBI GI NO: 18409505 NR Description: putative protein; protein id: At3g52180
  misc_feature (1)..(166): NCBI GI NO: 21536905 NR Description: unknown [Arabidopsis thaliana]
  misc_feature (1)..(166): NCBI GI NO: 16612246 NR Description: AT3g52180/F4F15_290 [Arabidopsis thaliana]
  misc_feature (1)..(166): NCBI GI NO: 11288831 NR Description: hypothetical protein F4F15
  misc_feature (1)..(19): NCBI GI NO: 34902388 NR Description: Unknown protein
  misc_feature (143)..(166): NCBI GI NO: 34902388 NR Description: Unknown protein
  misc_feature (72)..(166): NCBI GI NO: 11544661 NR Description: PTPKIS1 (truncated form) [Arabidopsis thaliana]
  misc_feature (1)..(165): NCBI GI NO: 21592631 NR Description: unknown [Arabidopsis thaliana]
  misc_feature (1)..(165): NCBI GI NO: 18399058 NR Description: expressed protein; protein id: At3g10940
MGTEKSEVYSTNMTQAMGAALTYRHELGMNYNFIRPDLIVGSCLQSPLDVDKLRKIGVKTVFCLQQDSDLEYFGVDIRAIQDYSLQFKDIVHCRAEIRDFDAFDLRLRLPAVVSKLHKLINCNGGVTYIHCTAGLGRAPAVALAYMFWILGYSLNEGHRLLQSKRALLSEVGSH

SEQ ID NO: 41896 - DNA, 1091 bp, Zea mays subsp. mays
  misc_feature (1)..(1091): Ceres Seq. ID no. 12566444
aaaacagatcccaagtgctgccggcgagccagccggcctccatcttgtagcgaccgttcgtgacgtcgatgggtgacttcgtgggccacgtgctgccgggcacgctgctgctggcggtgggcctgtggcgggtgtgggcgtcagtggcgcgcttcggggccgacccggcggcgttccgcgtccgctcctggaaccccgtcccggcggcggggccgcggctgctggagctgcacgtggtggccggcggcgcgttcctggacatgtgcgtggagctctactacgccaacccgctccgcgtcctcaccggcggcggggtcgacccgggccacctcggcggcctcgagcacgccagcatgctcctcatgttcttcctcttcggcgcgctcgccctcgtctccgagaagaccaggtacctgcctttatcggacggcgcgctgagcctggtgttcgcgagcgcattcacggcagagttcctgctcttctacttccactccaccacgcacgcggggctggagggctactaccaccgcctcctcctcgccgtcctcgccctctgcatcgccgcgctcgtcgccggcgcgctcctgcccgccagcttccccgccgacctcggcgccggcgtcctcatcgccgtccagggcctgtggttctaccaggccgcgctcacgctgtacggccccatgctccccgcgggctgcgtccgccacttcgactcccctcactccgacgcccgcatcgagtgccacggcggcgccgcgcaggagcgcgccgagcagctggccaacttccagctgttcgggctcgtgttcctcgcgttcttctacgcgctcgggtgctacgccgtgactgcggcaaggtatgggaataacctggagctgacgacggtccatcacacacatgtggctgcgactgccatgtagaaggagaacaaagtgcacgatctagtggccacggatctctttttttcttcttgttcagttcagagtacgtagggcaggcgagtacatgaatggctgggctgttcaaaagaagctcgagtgtgatcttacttaccgcatggacctgtcactgtaaaatgtcaagttcgagcc

SEQ ID NO: 41897 - protein, 283 aa, Zea mays subsp. mays
  peptide (1)..(283): Ceres Seq. ID no. 12566445
  misc_feature (114)..(266): Pfam Name: DUF716 Pfam Description: Family of unknown function
  misc_feature (1)..(280): NCBI GI NO: 22208473 NR Description: hypothetical protein [Sorghum bicolor]
  misc_feature (1)..(283): NCBI GI NO: 4416307 NR Description: hypothetical protein [Zea mays]
  misc_feature (1)..(280): NCBI GI NO: 4680504 NR Description: hypothetical protein [Oryza sativa]
  misc_feature (1)..(280): NCBI GI NO: 4680337 NR Description: hypothetical protein [Oryza sativa subsp. indica]
  misc_feature (6)..(280): NCBI GI NO: 4680346 NR Description: hypothetical protein [Oryza sativa subsp. indica]
  misc_feature (1)..(266): NCBI GI NO: 32470632 NR Description: putative plant viral-response family protein
  misc_feature (1)..(265): NCBI GI NO: 15222573 NR Description: hypothetical protein; protein id: At1g32120.1
  misc_feature (1)..(277): NCBI GI NO: 30695897 NR Description: expressed protein [Arabidopsis thaliana]
  misc_feature (1)..(269): NCBI GI NO: 15241195 NR Description: putative protein; protein id: At5g19870.1
  misc_feature (1)..(269): NCBI GI NO: 15222675 NR Description: unknown protein; protein id: At1g55230.1
MGDFVGHVLPGTLLLAVGLWRVWASVARFGADPAAFRVRSWNPVPAAGPRLLELHVVAGGAFLDMCVELYYANPLRVLTGGGVDPGHLGGLEHASMLLMFFLFGALALVSEKTRYLPLSDGALSLVFASAFTAEFLLFYFHSTTHAGLEGYYHRLLLAVLALCIAALVAGALLPASFPADLGAGVLIAVQGLWFYQAALTLYGPMLPAGCVRHFDSPHSDARIECHGGAAQERAEQLANFQLFGLVFLAFFYALGCYAVTAARYGNNLELTTVHHTHVAATAM

SEQ ID NO: 41898 - protein, 219 aa, Zea mays subsp. mays
  peptide (1)..(219): Ceres Seq. ID no. 12566446
  misc_feature (50)..(202): Pfam Name: DUF716 Pfam Description: Family of unknown function
  misc_feature (1)..(216): NCBI GI NO: 22208473 NR Description: hypothetical protein [Sorghum bicolor]
  misc_feature (1)..(219): NCBI GI NO: 4416307 NR Description: hypothetical protein [Zea mays]
  misc_feature (1)..(216): NCBI GI NO: 4680504 NR Description: hypothetical protein [Oryza sativa]
  misc_feature (1)..(216): NCBI GI NO: 4680337 NR Description: hypothetical protein [Oryza sativa subsp. indica]
  misc_feature (1)..(216): NCBI GI NO: 4680346 NR Description: hypothetical protein [Oryza sativa subsp. indica]
  misc_feature (1)..(202): NCBI GI NO: 32470632 NR Description: putative plant viral-response family protein
  misc_feature (1)..(201): NCBI GI NO: 15222573 NR Description: hypothetical protein; protein id: At1g32120.1
  misc_feature (1)..(213): NCBI GI NO: 30695897 NR Description: expressed protein [Arabidopsis thaliana]
  misc_feature (1)..(205): NCBI GI NO: 15241195 NR Description: putative protein; protein id: At5g19870.1
  misc_feature (1)..(205): NCBI GI NO: 15222675 NR Description: unknown protein; protein id: At1g55230.1
MCVELYYANPLRVLTGGGVDPGHLGGLEHASMLLMFFLFGALALVSEKTRYLPLSDGALSLVFASAFTAEFLLFYFHSTTHAGLEGYYHRLLLAVLALCIAALVAGALLPASFPADLGAGVLIAVQGLWFYQAALTLYGPMLPAGCVRHFDSPHSDARIECHGGAAQERAEQLANFQLFGLVFLAFFYALGCYAVTAARYGNNLELTTVHHTHVAATAM

SEQ ID NO: 41899 - protein, 188 aa, Zea mays subsp. mays
  peptide (1)..(188): Ceres Seq. ID no. 12566447
  misc_feature (19)..(171): Pfam Name: DUF716 Pfam Description: Family of unknown function
  misc_feature (1)..(185): NCBI GI NO: 22208473 NR Description: hypothetical protein [Sorghum bicolor]
  misc_feature (1)..(188): NCBI GI NO: 4416307 NR Description: hypothetical protein [Zea mays]
  misc_feature (1)..(185): NCBI GI NO: 4680504 NR Description: hypothetical protein [Oryza sativa]
  misc_feature (1)..(185): NCBI GI NO: 4680337 NR Description: hypothetical protein [Oryza sativa subsp. indica]
  misc_feature (1)..(185): NCBI GI NO: 4680346 NR Description: hypothetical protein [Oryza sativa subsp. indica]
  misc_feature (1)..(171): NCBI GI NO: 32470632 NR Description: putative plant viral-response family protein
  misc_feature (1)..(170): NCBI GI NO: 15222573 NR Description: hypothetical protein; protein id: At1g32120.1
  misc_feature (1)..(182): NCBI GI NO: 30695897 NR Description: expressed protein [Arabidopsis thaliana]
  misc_feature (1)..(174): NCBI GI NO: 15241195 NR Description: putative protein; protein id: At5g19870.1
  misc_feature (1)..(174): NCBI GI NO: 15222675 NR Description: unknown protein; protein id: At1g55230.1
MLLMFFLFGALALVSEKTRYLPLSDGALSLVFASAFTAEFLLFYFHSTTHAGLEGYYHRLLLAVLALCIAALVAGALLPASFPADLGAGVLIAVQGLWFYQAALTLYGPMLPAGCVRHFDSPHSDARIECHGGAAQERAEQLANFQLFGLVFLAFFYALGCYAVTAARYGNNLELTTVHHTHVAATAM

SEQ ID NO: 41900 - DNA, 1814 bp, Zea mays subsp. mays
  misc_feature (1)..(1814): Ceres Seq. ID no. 12443273
aggacccctattcttggctcagcaaatcctctcctcggcgcaaaggcatggagcgaatgctcatcccacctgaccacattttcccccacagagatcacatttaccgcgcacaaagcaccaacaacgatccacagcctgtttgcgagatctttagcacaaggagggaggcaggcatatagactcccacccgtgctctcattgtcagcacaacgaggcctgcggatcggtctgtgcgttctagagagaggggacgaggtttacccactgcgagagcggagaggggcagagaagagatccaaggttctggtacgtacagctgggagaagatgagctgcttcggatgcttcaagcccgacaagaaggtgccacccaggaggacggaatccagggaggtcacggtcgtcaacaaggcccccagccagaacgaagcgcctcccagggaatctgggtccatcaggccaccaccagttgcttcgaagcacaagcacagggccatcatctgaaacagcagcaagcatcgaacctcctaaaggaagttgttctgttgccaaaaccgcaaaagcattcacgttccgtgagctagccacggccacgaaaaacttccgctctgactgccttctcggagaagggggattcggcagggtatacaagggcaggcttgaaaacggacagcttgttgctgtcaagcaactagacctgaatgggtatcaaggcaacagagagttcctagttgaggtcctgatgctcagcctattgcaccatccaaacctagtcaatttggtgggctattgtgcagatggagatcaaaggcttctggtttatgagtacatggcacttggctcacttgcagatcacctgcttgatagcactcctgatcaagtgccactgagttggtatctcaggatgaagatagcttatggaactgcaaaagggcttgaatacctccatgagaaggcgaacccacctgtcatttaccgggatctcaagtcccccaacatccttctcgatgagaagtacaaccctaagctctcagattttgggctcgcaaagcttggcccagttgagggaaagacacacatctccactcgggtgatgggaacgtatgggtactgcgctccggaatacataagaacaggccagctaactgttaagaccgacgtgtacagttttggggttttcctactggagttgatcacaggaagaagagcagtggatacctccaggccagcaagtgaacagatcctggttaactgggtcaagcccatgctgagagacaggaagcgatacaatgagctagtagaccctcatcttagaggtgagtacccagaaaaagacttgagccaggctgtgggtgtggcagcaatgtgcctacaagaggaagcctcagtccggccttacatgagtgatgctgttgtggcactgggattccttgcagaaatgcctgctggctataaacacaaatctggacccatactccaaatgaaacaagttggagatccctcacgaactggtagcactaagcaagataaggatgcgtacaatcgtcaaaaagctgtagctgaggccattgagtggggctcactgaggcagaaacagaaggctcaaaatccagaaaagaaagctctaagtcaaggtatatcccctccagaagccagcagactgtgaaacacctctgctgtgcactaggttaccttctgacttgtaaccctccaattttgtgtaagacttagggccaaattgtcccacatagctgagagtttgtaaatgaaattcgtctctcataaagatgtaaggggtatatagtatttgctgtt

SEQ ID NO: 41901 - protein, 307 aa, Zea mays subsp. mays
  peptide (1)..(307): Ceres Seq. ID no. 12443274
  misc_feature (1)..(290): NCBI GI NO: 18397825 NR Description: putative protein kinase; protein id: At3g07070.1
  misc_feature (1)..(290): NCBI GI NO: 28416685 NR Description: At3g07070 [Arabidopsis thaliana]
  misc_feature (1)..(231): NCBI GI NO: 34907210 NR Description: putative serine/threonine kinase PBS1 protein
  misc_feature (249)..(289): NCBI GI NO: 34907210 NR Description: putative serine/threonine kinase PBS1 protein
  misc_feature (1)..(298): NCBI GI NO: 15238886 NR Description: protein kinase -like protein; protein id:At5g18610
  misc_feature (1)..(305): NCBI GI NO: 34395193 NR Description: putative protein serine/threonine kinase
  misc_feature (1)..(305): NCBI GI NO: 34899302 NR Description: putative protein serine/threonine kinase
  misc_feature (1)..(230): NCBI GI NO: 11994661 NR Description: receptor protein kinase-like protein
  misc_feature (1)..(230): NCBI GI NO: 15230190 NR Description: protein kinase, putative; protein id: At3g24790.1
  misc_feature (1)..(231): NCBI GI NO: 34394036 NR Description: putative protein serine/threonine kinase BNK1
MLSLLHHPNLVNLVGYCADGDQRLLVYEYMALGSLADHLLDSTPDQVPLSWYLRMKIAYGTAKGLEYLHEKANPPVIYRDLKSPNILLDEKYNPKLSDFGLAKLGPVEGKTHISTRVMGTYGYCAPEYIRTGQLTVKTDVYSFGVFLLELITGRRAVDTSRPASEQILVNWVKPMLRDRKRYNELVDPHLRGEYPEKDLSQAVGVAAMCLQEEASVRPYMSDAVVALGFLAEMPAGYKHKSGPILQMKQVGDPSRTGSTKQDKDAYNRQKAVAEAIEWGSLRQKQKAQNPEKKALSQGISPPEASRL

SEQ ID NO: 41902 - protein, 278 aa, Zea mays subsp. mays
  peptide (1)..(278): Ceres Seq. ID no. 12443275
  misc_feature (1)..(261): NCBI GI NO: 18397825 NR Description: putative protein kinase; protein id: At3g07070.1
  misc_feature (1)..(261): NCBI GI NO: 28416685 NR Description: At3g07070 [Arabidopsis thaliana]
  misc_feature (1)..(202): NCBI GI NO: 34907210 NR Description: putative serine/threonine kinase PBS1 protein
  misc_feature (220)..(260): NCBI GI NO: 34907210 NR Description: putative serine/threonine kinase PBS1 protein
  misc_feature (1)..(269): NCBI GI NO: 15238886 NR Description: protein kinase -like protein; protein id:At5g18610
  misc_feature (1)..(276): NCBI GI NO: 34395193 NR Description: putative protein serine/threonine kinase
  misc_feature (1)..(276): NCBI GI NO: 34899302 NR Description: putative protein serine/threonine kinase
  misc_feature (1)..(201): NCBI GI NO: 11994661 NR Description: receptor protein kinase-like protein
  misc_feature (1)..(201): NCBI GI NO: 15230190 NR Description: protein kinase, putative; protein id: At3g24790.1
  misc_feature (1)..(202): NCBI GI NO: 34394036 NR Description: putative protein serine/threonine kinase BNK1
MALGSLADHLLDSTPDQVPLSWYLRMKIAYGTAKGLEYLHEKANPPVIYRDLKSPNILLDEKYNPKLSDFGLAKLGPVEGKTHISTRVMGTYGYCAPEYIRTGQLTVKTDVYSFGVFLLELITGRRAVDTSRPASEQILVNWVKPMLRDRKRYNELVDPHLRGEYPEKDLSQAVGVAAMCLQEEASVRPYMSDAVVALGFLAEMPAGYKHKSGPILQMKQVGDPSRTGSTKQDKDAYNRQKAVAEAIEWGSLRQKQKAQNPEKKALSQGISPPEASRL

SEQ ID NO: 41903 - protein, 253 aa, Zea mays subsp. mays
  peptide (1)..(253): Ceres Seq. ID no. 12443276
  misc_feature (1)..(236): NCBI GI NO: 18397825 NR Description: putative protein kinase; protein id: At3g07070.1
  misc_feature (1)..(236): NCBI GI NO: 28416685 NR Description: At3g07070 [Arabidopsis thaliana]
  misc_feature (1)..(177): NCBI GI NO: 34907210 NR Description: putative serine/threonine kinase PBS1 protein
  misc_feature (195)..(235): NCBI GI NO: 34907210 NR Description: putative serine/threonine kinase PBS1 protein
  misc_feature (1)..(244): NCBI GI NO: 15238886 NR Description: protein kinase -like protein; protein id:At5g18610
  misc_feature (1)..(251): NCBI GI NO: 34395193 NR Description: putative protein serine/threonine kinase
  misc_feature (1)..(251): NCBI GI NO: 34899302 NR Description: putative protein serine/threonine kinase
  misc_feature (1)..(176): NCBI GI NO: 11994661 NR Description: receptor protein kinase-like protein
  misc_feature (1)..(176): NCBI GI NO: 15230190 NR Description: protein kinase, putative; protein id: At3g24790.1
  misc_feature (1)..(177): NCBI GI NO: 34394036 NR Description: putative protein serine/threonine kinase BNK1
MKIAYGTAKGLEYLHEKANPPVIYRDLKSPNILLDEKYNPKLSDFGLAKLGPVEGKTHISTRVMGTYGYCAPEYIRTGQLTVKTDVYSFGVFLLELITGRRAVDTSRPASEQILVNWVKPMLRDRKRYNELVDPHLRGEYPEKDLSQAVGVAAMCLQEEASVRPYMSDAVVALGFLAEMPAGYKHKSGPILQMKQVGDPSRTGSTKQDKDAYNRQKAVAEAIEWGSLRQKQKAQNPEKKALSQGISPPEASRL

SEQ ID NO: 41904 - DNA, 1782 bp, Zea mays subsp. mays
  misc_feature (1)..(1782): Ceres Seq. ID no. 12376897
gcacgagaccattacctagaacatcctaatcgaaaaatacgttcccacttctagcgcccccttgctccttcttccccgagccgcgtgcccgcgtcaagtaaccaaacctgtcataggctgatagctctcctctccactcctctttcctcgttgattcctcataccatctcctgcgccaccgacggcgaatccgcgtggcggcgccccgaatctgcgctctccgcgctcagatctcccgcctccgcgcttccggatgagccgcccccatttgcccaaggacccggccttcccgcgcaccaacgggtccttggacggcggggcccgcggccgcggcgagatcgaggaggttggcgctgcggccaccgtaggacgtcgaacagtcccccctgcagtcctcgtctccgtcggcatcgtcgccaccggcggcgatgtcatcgtgcgggcaatacatgctacaccgggtgcgcaagctggacaccctagcgggcgttgccatcaagtacggtgtcgaggtagccgacattaagaggctgaacggcctctcagctgacctccagatgtttgctcacaagacactgcagattccactcccggggaggcatcctccgtcatcataccagcagaatggctcatatgagagtgacgacagggaatgtactccacaccgcattcacgatgatatcttggattcaatattgaaaacaccaaagcccaaagtttcgccagctatgagtcttctgcagggatactatggccttgcaccacctccaaagagagatcaaacaagcgaaggcactgagatggcagtttacagtaaaggcaaatctgcttttctggatgttgagccgtggctggagccgccaaattccgacccattccctctccagaataggaaaaccaaaagcttgacgataggttctcttgatggtgatactgatgagaatggtgacagtgaaaggttcgtaaggcggcgccagaaagctgatggtgagctgttaccgagggaggaaaatggcggtgactttctggcaagcgccggaaaaggcttggcactgaggccaaagtctagcagtcgaccagacatgaacaagagccagcagaatctttttgcaatggcggagcctttgtttggcagcggcgtgcaaactgtaaggaaatcatccagcactccagagttccaggagccagagaccagcaccagttcatccatatggtcagcaagcaagtggagcataaatacagatgcttttgctcttcctctccccatccctcgttttgacaacattccgaagcccattgctgcttggagaaacaaggcggctcgcgattaataaactgctatataatcttggttatgtgcatgatttttcctgaactccaggaggcccagaacgtgtaattaggttggcaccagcctttacagctttggaagcagagcagagcagagcaggaccgtaattggctcctgcgagctagaacattctgaagatcagacgcatgtcgtccatgtttccagatggtatctagattaggtttacatgattctcatgttatattgggcatgttgcgccaagagtagcaacgttaatattcggtcatataaattatagatgctagatgacatagaggagacttgatatttgcggagggtattcttttgtacacaatgagataatgtagagcatcaaaggaatccacaatgagatatgtgttgtatgtgtgatcccatacccaaacatggaggaggattgctttatttaactacagattttgtttttcttc

SEQ ID NO: 41905 - protein, 300 aa, Zea mays subsp. mays
  peptide (1)..(300): Ceres Seq. ID no. 12376898
  misc_feature (10)..(53): Pfam Name: Pfam Description:  LysM domain
  misc_feature (1)..(300): NCBI GI NO: 37535512 NR Description: unknown protein
  misc_feature (153)..(300): NCBI GI NO: 24431595 NR Description: Hypothetical protein
  misc_feature (1)..(55): NCBI GI NO: 24431595 NR Description: Hypothetical protein
  misc_feature (1)..(215): NCBI GI NO: 22327003 NR Description: unknown protein; protein id: At5g23130
  misc_feature (1)..(215): NCBI GI NO: 9759371 NR Description: gene_id:MYJ24.12~unknown protein
  misc_feature (1)..(215): NCBI GI NO: 11291586 NR Description: hypothetical protein T22D6
  misc_feature (1)..(215): NCBI GI NO: 30682281 NR Description: expressed protein [Arabidopsis thaliana]
  misc_feature (81)..(226): NCBI GI NO: 24431595 NR Description: Hypothetical protein
  misc_feature (123)..(300): NCBI GI NO: 11291586 NR Description: hypothetical protein T22D6
  misc_feature (123)..(300): NCBI GI NO: 30682281 NR Description: expressed protein [Arabidopsis thaliana]
MSSCGQYMLHRVRKLDTLAGVAIKYGVEVADIKRLNGLSADLQMFAHKTLQIPLPGRHPPSSYQQNGSYESDDRECTPHRIHDDILDSILKTPKPKVSPAMSLLQGYYGLAPPPKRDQTSEGTEMAVYSKGKSAFLDVEPWLEPPNSDPFPLQNRKTKSLTIGSLDGDTDENGDSERFVRRRQKADGELLPREENGGDFLASAGKGLALRPKSSSRPDMNKSQQNLFAMAEPLFGSGVQTVRKSSSTPEFQEPETSTSSSIWSASKWSINTDAFALPLPIPRFDNIPKPIAAWRNKAARD

SEQ ID NO: 41906 - protein, 293 aa, Zea mays subsp. mays
  peptide (1)..(293): Ceres Seq. ID no. 12376899
  misc_feature (3)..(46): Pfam Name: Pfam Description:  LysM domain
  misc_feature (1)..(293): NCBI GI NO: 37535512 NR Description: unknown protein
  misc_feature (146)..(293): NCBI GI NO: 24431595 NR Description: Hypothetical protein
  misc_feature (1)..(48): NCBI GI NO: 24431595 NR Description: Hypothetical protein
  misc_feature (1)..(208): NCBI GI NO: 22327003 NR Description: unknown protein; protein id: At5g23130
  misc_feature (1)..(208): NCBI GI NO: 9759371 NR Description: gene_id:MYJ24.12~unknown protein
  misc_feature (1)..(208): NCBI GI NO: 11291586 NR Description: hypothetical protein T22D6
  misc_feature (1)..(208): NCBI GI NO: 30682281 NR Description: expressed protein [Arabidopsis thaliana]
  misc_feature (74)..(219): NCBI GI NO: 24431595 NR Description: Hypothetical protein
  misc_feature (116)..(293): NCBI GI NO: 11291586 NR Description: hypothetical protein T22D6
  misc_feature (116)..(293): NCBI GI NO: 30682281 NR Description: expressed protein [Arabidopsis thaliana]
MLHRVRKLDTLAGVAIKYGVEVADIKRLNGLSADLQMFAHKTLQIPLPGRHPPSSYQQNGSYESDDRECTPHRIHDDILDSILKTPKPKVSPAMSLLQGYYGLAPPPKRDQTSEGTEMAVYSKGKSAFLDVEPWLEPPNSDPFPLQNRKTKSLTIGSLDGDTDENGDSERFVRRRQKADGELLPREENGGDFLASAGKGLALRPKSSSRPDMNKSQQNLFAMAEPLFGSGVQTVRKSSSTPEFQEPETSTSSSIWSASKWSINTDAFALPLPIPRFDNIPKPIAAWRNKAARD

SEQ ID NO: 41907 - protein, 257 aa, Zea mays subsp. mays
  peptide (1)..(257): Ceres Seq. ID no. 12376900
  misc_feature (1)..(257): NCBI GI NO: 37535512 NR Description: unknown protein
  misc_feature (110)..(257): NCBI GI NO: 24431595 NR Description: Hypothetical protein
  misc_feature (1)..(12): NCBI GI NO: 24431595 NR Description: Hypothetical protein
  misc_feature (1)..(172): NCBI GI NO: 22327003 NR Description: unknown protein; protein id: At5g23130
  misc_feature (1)..(172): NCBI GI NO: 9759371 NR Description: gene_id:MYJ24.12~unknown protein
  misc_feature (1)..(172): NCBI GI NO: 11291586 NR Description: hypothetical protein T22D6
  misc_feature (1)..(172): NCBI GI NO: 30682281 NR Description: expressed protein [Arabidopsis thaliana]
  misc_feature (38)..(183): NCBI GI NO: 24431595 NR Description: Hypothetical protein
  misc_feature (80)..(257): NCBI GI NO: 11291586 NR Description: hypothetical protein T22D6
  misc_feature (80)..(257): NCBI GI NO: 30682281 NR Description: expressed protein [Arabidopsis thaliana]
MFAHKTLQIPLPGRHPPSSYQQNGSYESDDRECTPHRIHDDILDSILKTPKPKVSPAMSLLQGYYGLAPPPKRDQTSEGTEMAVYSKGKSAFLDVEPWLEPPNSDPFPLQNRKTKSLTIGSLDGDTDENGDSERFVRRRQKADGELLPREENGGDFLASAGKGLALRPKSSSRPDMNKSQQNLFAMAEPLFGSGVQTVRKSSSTPEFQEPETSTSSSIWSASKWSINTDAFALPLPIPRFDNIPKPIAAWRNKAARD

SEQ ID NO: 41908 - DNA, 1248 bp, Zea mays subsp. mays
  misc_feature (1)..(1248): Ceres Seq. ID no. 12390236
aatcgaaaagagctcacttcctcatctaatctacatgtctagaattatatgttgatggtttcttatggtattgactggctgtcttgtaattgctggctatagaatgcaggtgatcaacaaacagaaggttcatctcagccagaaaggaattcaatggaggaggggaacagaaagatttcgcccaaaatacaaagcaaggaagattcttctgatggtgatggtactaaagaggactatgttcatatccgggcaaagcgaggtcaagccactaacagccacagcctcgcagaaagactgaggagaaaaaagataagtgagagaatgaagcttcttcaagatcttgttcctggatgcagtaagatcactggcaaggcagtcatgctcgatgagattatcaactatgtacagtcattgcaacgacaagtggagttcttgtcaatgaaactttcaactgttaaccctgaacttggctttgacattgagcagatcatatccaaacaaatgatgctttcacaagacagacatcttgctttctatggagtcgatccaggatcaagcagccttactgctccattcaaccaaggaatcgtgcagccagcaatgatgtgcaacatttctaatcctgccgatgttttgcacggaactattcatgacgtgtcaacaatgaaccagataccttccatgtgggaaggacttcagagcatgcctcagatgaacttcaaccctggtgtggcagctgatagcggcaccaacaactctggctccatgaagatcgaacagtgagctgctgtatagtagcttcgaaattgttgtgtgaatcactgaatcatcgtaaagcgctctcgagatgaagctttttttgtatagctggaggcctgaccattatgctggattcctgcggttgctcccatactgtgcggcacattgtttatggtatggcatatggatcgtgtacagctggagctgaagaactgattccactgtaaatttctgttgtgctttggcctgcgaaaattgggatggaaacctagtagcatccatgaaattcaaggacagaagcttgttgggattgggacttgggaccacgtgctgaatactgatgggcctaaacgtactagacgagtactaatagaatcgtagttgtaggtaaaaaaatgcagagtttgaaaccagtggttttgtcagaaattccatggagtttgctatatttatttatgatatcaaaacagaaactgaatggccgctggc

SEQ ID NO: 41909 - protein, 209 aa, Zea mays subsp. mays
  peptide (1)..(209): Ceres Seq. ID no. 12390237
  misc_feature (38)..(88): Pfam Name: Pfam Description:  Helix-loop-helix DNA-binding domain
  misc_feature (1)..(209): NCBI GI NO: 28273388 NR Description: putative Helix-loop-helix DNA-binding domaincontaining protein
  misc_feature (1)..(208): NCBI GI NO: 15221563 NR Description: putative DNA-binding protein; protein id:At1g68920
  misc_feature (1)..(208): NCBI GI NO: 30697769 NR Description: DNA-binding protein -related
  misc_feature (1)..(208): NCBI GI NO: 20127044 NR Description: putative bHLH transcription factor
  misc_feature (1)..(132): NCBI GI NO: 30681559 NR Description: expressed protein [Arabidopsis thaliana]
  misc_feature (1)..(160): NCBI GI NO: 27311243 NR Description: Hypothetical protein
  misc_feature (1)..(202): NCBI GI NO: 22331295 NR Description: bHLH protein; protein id: At3g23690
  misc_feature (1)..(166): NCBI GI NO: 34898690 NR Description: hypothetical protein
  misc_feature (1)..(166): NCBI GI NO: 34906952 NR Description: DNA-binding protein-like protein
  misc_feature (1)..(186): NCBI GI NO: 15231450 NR Description: bHLH protein; protein id: At3g07340
MEEGNRKISPKIQSKEDSSDGDGTKEDYVHIRAKRGQATNSHSLAERLRRKKISERMKLLQDLVPGCSKITGKAVMLDEIINYVQSLQRQVEFLSMKLSTVNPELGFDIEQIISKQMMLSQDRHLAFYGVDPGSSSLTAPFNQGIVQPAMMCNISNPADVLHGTIHDVSTMNQIPSMWEGLQSMPQMNFNPGVAADSGTNNSGSMKIEQ

SEQ ID NO: 41910 - protein, 153 aa, Zea mays subsp. mays
  peptide (1)..(153): Ceres Seq. ID no. 12390238
  misc_feature (1)..(153): NCBI GI NO: 28273388 NR Description: putative Helix-loop-helix DNA-binding domaincontaining protein
  misc_feature (1)..(152): NCBI GI NO: 15221563 NR Description: putative DNA-binding protein; protein id:At1g68920
  misc_feature (1)..(152): NCBI GI NO: 30697769 NR Description: DNA-binding protein -related
  misc_feature (1)..(152): NCBI GI NO: 20127044 NR Description: putative bHLH transcription factor
  misc_feature (1)..(76): NCBI GI NO: 30681559 NR Description: expressed protein [Arabidopsis thaliana]
  misc_feature (1)..(104): NCBI GI NO: 27311243 NR Description: Hypothetical protein
  misc_feature (1)..(146): NCBI GI NO: 22331295 NR Description: bHLH protein; protein id: At3g23690
  misc_feature (1)..(110): NCBI GI NO: 34898690 NR Description: hypothetical protein
  misc_feature (1)..(110): NCBI GI NO: 34906952 NR Description: DNA-binding protein-like protein
  misc_feature (1)..(130): NCBI GI NO: 15231450 NR Description: bHLH protein; protein id: At3g07340
MKLLQDLVPGCSKITGKAVMLDEIINYVQSLQRQVEFLSMKLSTVNPELGFDIEQIISKQMMLSQDRHLAFYGVDPGSSSLTAPFNQGIVQPAMMCNISNPADVLHGTIHDVSTMNQIPSMWEGLQSMPQMNFNPGVAADSGTNNSGSMKIEQ

SEQ ID NO: 41911 - protein, 134 aa, Zea mays subsp. mays
  peptide (1)..(134): Ceres Seq. ID no. 12390239
  misc_feature (1)..(134): NCBI GI NO: 28273388 NR Description: putative Helix-loop-helix DNA-binding domaincontaining protein
  misc_feature (1)..(133): NCBI GI NO: 15221563 NR Description: putative DNA-binding protein; protein id:At1g68920
  misc_feature (1)..(133): NCBI GI NO: 30697769 NR Description: DNA-binding protein -related
  misc_feature (1)..(133): NCBI GI NO: 20127044 NR Description: putative bHLH transcription factor
  misc_feature (1)..(57): NCBI GI NO: 30681559 NR Description: expressed protein [Arabidopsis thaliana]
  misc_feature (1)..(85): NCBI GI NO: 27311243 NR Description: Hypothetical protein
  misc_feature (1)..(127): NCBI GI NO: 22331295 NR Description: bHLH protein; protein id: At3g23690
  misc_feature (1)..(91): NCBI GI NO: 34898690 NR Description: hypothetical protein
  misc_feature (1)..(91): NCBI GI NO: 34906952 NR Description: DNA-binding protein-like protein
  misc_feature (1)..(111): NCBI GI NO: 15231450 NR Description: bHLH protein; protein id: At3g07340
MLDEIINYVQSLQRQVEFLSMKLSTVNPELGFDIEQIISKQMMLSQDRHLAFYGVDPGSSSLTAPFNQGIVQPAMMCNISNPADVLHGTIHDVSTMNQIPSMWEGLQSMPQMNFNPGVAADSGTNNSGSMKIEQ

SEQ ID NO: 41912 - DNA, 1656 bp, Zea mays subsp. mays
  misc_feature (1)..(1656): Ceres Seq. ID no. 12454875
atctcctctcctgccaggtcacggcctaattcgtggaattttgtttggtggtgcatatctccagtcaagtcttggccaagattttagctatctccggtcaaaaggctttaccgattcttggattggtggcttcttgggggcgagaagccggttcctgtttcgtctcttgtgctccagcatgttctgtagcacaccggttccccatctccagtgaaggtgttcgtgtgctcttggttttgtgcctcccggaatcgttcccggaaagctacttttggccgctgcggcgatggcgtcgagcaccagcgagatggccgaggggaaggagaagctgaagaggtccggcagcttgggaagcaacgatacgtatgtgcgtgcagacaagattgatcttacgagcctcgacatccagctggagaaccagctcaccaagacctggggcaaagccaatctcaaatcccaggggccaaaggaggagtgggagatcgaccttgcaaagctggagatccgctatgtcatcgctcaggggacgtatggcacggtctaccggggcacctacgatggacaggacgtcgcagtgaagcttttggattggggagaagatggttttgccacagaggctgaaactgctgctttacgaacatcatttaagacggaggttgctgtttggcataagctcagccaccctaatgttacaaagtttgttggtgcatctatggggaccacagaccttaagattccatcaaacaattccaatggtgctgcacgtacaaatttgccagcaagagcatgttgtgttgtggtagagtatcttgctggaggaactttgaagcaatatttgataaagaatagccgacggaagcttgcttataaagttgtggtccagcttgcattggatttggccagaggattgagctatctgcactccagaaagattgtacatcgggatgtgaaaagcgaaaacatgctgcttactccacagagaaaccttaagattgccgatttcggtgttgctcgtgttgaggctcagaatccaaaggacatgactggtgcaacaggcacacttggttatatggctccagaggttcttgatggtaagccatacaacaggaagtgtgatgtttatagttttggcatttgtttatgggaaatctattgctgtgacatgccttacccagacctaagttttgccgatgtctcatctgccgttgttcaccagaatttgcgcccagacattcctcgctgctgcccaagcgcatttgcgaatgttatgcggaaatgctgggatgcaaaccctgataaacgccctgatatggatgaagtggtgcagcttttagaggctctggacacgagcaaaggcggtggcatgatacctgatggccaatcatcaggatgcttatgcttcacaaaggctcgtggtccatagatacttttcatggtactcccttcccttggcaacactttccccgtgtaaatgactgggccacagcatgcttctctttgcacgacctgtgcagtcgtcgcttacagttctccatagctgccttgcgatcattgcgtgtcaacctgtagctctcatacgatttttgctgtcctctgtcgacaatcttttcatatactagtgtgctgctgtaattgtggttctaaaagagatttggc

SEQ ID NO: 41913 - protein, 378 aa, Zea mays subsp. mays
  peptide (1)..(378): Ceres Seq. ID no. 12454876
  misc_feature (1)..(378): NCBI GI NO: 18403507 NR Description: expressed protein; protein id: At3g22750
  misc_feature (12)..(378): NCBI GI NO: 15233574 NR Description: kinase like protein; protein id: At4g14780.1
  misc_feature (61)..(378): NCBI GI NO: 15232131 NR Description: putative protein kinase; protein id: At3g01490
  misc_feature (12)..(63): NCBI GI NO: 15232131 NR Description: putative protein kinase; protein id: At3g01490
  misc_feature (2)..(378): NCBI GI NO: 15229398 NR Description: ATMRK1; protein id: At3g63260
  misc_feature (2)..(378): NCBI GI NO: 21554375 NR Description: ATMRK1 [Arabidopsis thaliana]
  misc_feature (61)..(378): NCBI GI NO: 29367399 NR Description: putative protein kinase
  misc_feature (22)..(63): NCBI GI NO: 29367399 NR Description: putative protein kinase
  misc_feature (58)..(378): NCBI GI NO: 34911620 NR Description: protein kinase -like
  misc_feature (63)..(378): NCBI GI NO: 15240597 NR Description: protein kinase; protein id: At5g50000
MASSTSEMAEGKEKLKRSGSLGSNDTYVRADKIDLTSLDIQLENQLTKTWGKANLKSQGPKEEWEIDLAKLEIRYVIAQGTYGTVYRGTYDGQDVAVKLLDWGEDGFATEAETAALRTSFKTEVAVWHKLSHPNVTKFVGASMGTTDLKIPSNNSNGAARTNLPARACCVVVEYLAGGTLKQYLIKNSRRKLAYKVVVQLALDLARGLSYLHSRKIVHRDVKSENMLLTPQRNLKIADFGVARVEAQNPKDMTGATGTLGYMAPEVLDGKPYNRKCDVYSFGICLWEIYCCDMPYPDLSFADVSSAVVHQNLRPDIPRCCPSAFANVMRKCWDANPDKRPDMDEVVQLLEALDTSKGGGMIPDGQSSGCLCFTKARGP

SEQ ID NO: 41914 - protein, 371 aa, Zea mays subsp. mays
  peptide (1)..(371): Ceres Seq. ID no. 12454877
  misc_feature (1)..(371): NCBI GI NO: 18403507 NR Description: expressed protein; protein id: At3g22750
  misc_feature (5)..(371): NCBI GI NO: 15233574 NR Description: kinase like protein; protein id: At4g14780.1
  misc_feature (54)..(371): NCBI GI NO: 15232131 NR Description: putative protein kinase; protein id: At3g01490
  misc_feature (5)..(56): NCBI GI NO: 15232131 NR Description: putative protein kinase; protein id: At3g01490
  misc_feature (1)..(371): NCBI GI NO: 15229398 NR Description: ATMRK1; protein id: At3g63260
  misc_feature (1)..(371): NCBI GI NO: 21554375 NR Description: ATMRK1 [Arabidopsis thaliana]
  misc_feature (54)..(371): NCBI GI NO: 29367399 NR Description: putative protein kinase
  misc_feature (15)..(56): NCBI GI NO: 29367399 NR Description: putative protein kinase
  misc_feature (51)..(371): NCBI GI NO: 34911620 NR Description: protein kinase -like
  misc_feature (56)..(371): NCBI GI NO: 15240597 NR Description: protein kinase; protein id: At5g50000
MAEGKEKLKRSGSLGSNDTYVRADKIDLTSLDIQLENQLTKTWGKANLKSQGPKEEWEIDLAKLEIRYVIAQGTYGTVYRGTYDGQDVAVKLLDWGEDGFATEAETAALRTSFKTEVAVWHKLSHPNVTKFVGASMGTTDLKIPSNNSNGAARTNLPARACCVVVEYLAGGTLKQYLIKNSRRKLAYKVVVQLALDLARGLSYLHSRKIVHRDVKSENMLLTPQRNLKIADFGVARVEAQNPKDMTGATGTLGYMAPEVLDGKPYNRKCDVYSFGICLWEIYCCDMPYPDLSFADVSSAVVHQNLRPDIPRCCPSAFANVMRKCWDANPDKRPDMDEVVQLLEALDTSKGGGMIPDGQSSGCLCFTKARGP

SEQ ID NO: 41915 - protein, 236 aa, Zea mays subsp. mays
  peptide (1)..(236): Ceres Seq. ID no. 12454878
  misc_feature (1)..(236): NCBI GI NO: 18403507 NR Description: expressed protein; protein id: At3g22750
  misc_feature (1)..(236): NCBI GI NO: 15233574 NR Description: kinase like protein; protein id: At4g14780.1
  misc_feature (1)..(236): NCBI GI NO: 15232131 NR Description: putative protein kinase; protein id: At3g01490
  misc_feature (1)..(236): NCBI GI NO: 15229398 NR Description: ATMRK1; protein id: At3g63260
  misc_feature (1)..(236): NCBI GI NO: 21554375 NR Description: ATMRK1 [Arabidopsis thaliana]
  misc_feature (1)..(236): NCBI GI NO: 29367399 NR Description: putative protein kinase
  misc_feature (1)..(236): NCBI GI NO: 34911620 NR Description: protein kinase -like
  misc_feature (1)..(236): NCBI GI NO: 15240597 NR Description: protein kinase; protein id: At5g50000
  misc_feature (1)..(236): NCBI GI NO: 21553402 NR Description: protein kinase [Arabidopsis thaliana]
  misc_feature (1)..(235): NCBI GI NO: 14626298 NR Description: putative protein kinase
MGTTDLKIPSNNSNGAARTNLPARACCVVVEYLAGGTLKQYLIKNSRRKLAYKVVVQLALDLARGLSYLHSRKIVHRDVKSENMLLTPQRNLKIADFGVARVEAQNPKDMTGATGTLGYMAPEVLDGKPYNRKCDVYSFGICLWEIYCCDMPYPDLSFADVSSAVVHQNLRPDIPRCCPSAFANVMRKCWDANPDKRPDMDEVVQLLEALDTSKGGGMIPDGQSSGCLCFTKARGP

SEQ ID NO: 41916 - DNA, 427 bp, Zea mays subsp. mays
  misc_feature (1)..(427): Ceres Seq. ID no. 2788106
gatcaagttcgcttctgccagtctgcctgcgtgctctgctggacagctggagagctagatggcgatgccgtccgggtggaggggtatcctgggcttccactacggcatcgtgcaggcgccgttgggccccgacatctccggccccgagctcgtcgccgccgtagcgaacgccggcgccatcggcctcctccgcctccccgactggccggcgccggatcacgtcagagaactgatccggaagaccaggagcctcacgtccaagccgttcggggcggccatcgtgctggccttcccgcacgaggagaatctcagggtcgtccctggaggagaagctcgccgtgctgcaggtctacyggggggacttccccaaccaccgggtccaaagaggcgcatcgcgcccggggttaaggtcttgcatcaggtcggc

SEQ ID NO: 41917 - protein, 135 aa, Zea mays subsp. mays
  peptide (1)..(135): Ceres Seq. ID no. 2788107
  misc_feature (118)..(118): Xaa is any aa, unknown or other
DQVRFCQSACVLCWTAGELDGDAVRVEGYPGLPLRHRAGAVGPRHLRPRARRRRSERRRHRPPPPPRLAGAGSRQRTDPEDQEPHVQAVRGGHRAGLPARGESQGRPWRRSSPCCRSXGGTSPTTGSKEAHRARG

SEQ ID NO: 41918 - protein, 123 aa, Zea mays subsp. mays
  peptide (1)..(123): Ceres Seq. ID no. 2788108
  misc_feature (8)..(122): Pfam Name: Pfam Description:  2-nitropropane dioxygenase
  misc_feature (8)..(122): NCBI GI NO: 30697982 NR Description: 2-nitropropane dioxygenase-related protein
  misc_feature (52)..(122): NCBI GI NO: 30697978 NR Description: 2-nitropropane dioxygenase-related protein
  misc_feature (1)..(76): NCBI GI NO: 30019518 NR Description: Nitropropane dioxygenase / Trans-enoyl-CoAreductase family
  misc_feature (8)..(119): NCBI GI NO: 23015687 NR Description: hypothetical protein
  misc_feature (10)..(87): NCBI GI NO: 20807921 NR Description: Dioxygenases related to 2-nitropropane dioxygenase
  misc_feature (10)..(119): NCBI GI NO: 16127609 NR Description: conserved hypothetical protein
  misc_feature (10)..(84): NCBI GI NO: 28209899 NR Description: enoyl-
  misc_feature (10)..(104): NCBI GI NO: 29346965 NR Description: dioxygenase, related to 2-nitropropane dioxygenase
  misc_feature (99)..(99): Xaa is any aa, unknown or other
MAMPSGWRGILGFHYGIVQAPLGPDISGPELVAAVANAGAIGLLRLPDWPAPDHVRELIRKTRSLTSKPFGAAIVLAFPHEENLRVVPGGEARRAAGLXGGLPQPPGPKRRIAPGVKVLHQVG

SEQ ID NO: 41919 - protein, 121 aa, Zea mays subsp. mays
  peptide (1)..(121): Ceres Seq. ID no. 2788109
  misc_feature (6)..(120): Pfam Name: Pfam Description:  2-nitropropane dioxygenase
  misc_feature (6)..(120): NCBI GI NO: 30697982 NR Description: 2-nitropropane dioxygenase-related protein
  misc_feature (50)..(120): NCBI GI NO: 30697978 NR Description: 2-nitropropane dioxygenase-related protein
  misc_feature (1)..(74): NCBI GI NO: 30019518 NR Description: Nitropropane dioxygenase / Trans-enoyl-CoAreductase family
  misc_feature (6)..(117): NCBI GI NO: 23015687 NR Description: hypothetical protein
  misc_feature (8)..(85): NCBI GI NO: 20807921 NR Description: Dioxygenases related to 2-nitropropane dioxygenase
  misc_feature (8)..(117): NCBI GI NO: 16127609 NR Description: conserved hypothetical protein
  misc_feature (8)..(82): NCBI GI NO: 28209899 NR Description: enoyl-
  misc_feature (8)..(102): NCBI GI NO: 29346965 NR Description: dioxygenase, related to 2-nitropropane dioxygenase
  misc_feature (97)..(97): Xaa is any aa, unknown or other
MPSGWRGILGFHYGIVQAPLGPDISGPELVAAVANAGAIGLLRLPDWPAPDHVRELIRKTRSLTSKPFGAAIVLAFPHEENLRVVPGGEARRAAGLXGGLPQPPGPKRRIAPGVKVLHQVG

SEQ ID NO: 41920 - DNA, 443 bp, Zea mays subsp. mays
  misc_feature (1)..(443): Ceres Seq. ID no. 2787343
  misc_feature (400)..(400): n is a, c, t, g, unknown, or other
agagcccagcgtccgtctcttgctcatcagcatcagctagccacccgaccaggcttcagaaaacaaaaaaatgaagctctctgcggcagtcctctgcgcgcttgtggctgttcaggcggcggtgcttctcgccaccgtgccgacggcgcaggccagcgagctggaggtcgggtactacagcaagaaatgcaagggcgtggagaacgtggtgaagtggcacgtcatcaaggcgatcaaggccaaccgccgcaccggcgccgctctcgtccgccttatcttccatgactgcttcgtcaggggttgcgacggttctgtccttctggacgcttcctacgacaaccctcacccggagaaggaagcgccggtgaacatcgggctcgcagccttcgacgtactggangagatcaargccgctgtcgagaagagtgccccggcgtggtctc

SEQ ID NO: 41921 - protein, 124 aa, Zea mays subsp. mays
  peptide (1)..(124): Ceres Seq. ID no. 2787344
  misc_feature (47)..(121): Pfam Name: Pfam Description:  Peroxidase
  misc_feature (1)..(121): NCBI GI NO: 34894404 NR Description: putative peroxidase
  misc_feature (1)..(121): NCBI GI NO: 34894394 NR Description: putative peroxidase
  misc_feature (11)..(121): NCBI GI NO: 34894398 NR Description: putative peroxidase
  misc_feature (3)..(121): NCBI GI NO: 12039346 NR Description: putative peroxidase [Oryza sativa]
  misc_feature (10)..(121): NCBI GI NO: 27261094 NR Description: putative peroxidase
  misc_feature (24)..(121): NCBI GI NO: 27261097 NR Description: putative peroxidase
  misc_feature (1)..(121): NCBI GI NO: 12039335 NR Description: putative peroxidase [Oryza sativa]
  misc_feature (2)..(121): NCBI GI NO: 34896944 NR Description: putative peroxidase [Oryza sativa]
  misc_feature (2)..(121): NCBI GI NO: 34896266 NR Description: putative peroxidase [Oryza sativa]
  misc_feature (1)..(121): NCBI GI NO: 12039354 NR Description: putative peroxidase [Oryza sativa]
  misc_feature (110)..(110): Xaa is any aa, unknown or other
  misc_feature (113)..(113): Xaa is any aa, unknown or other
MKLSAAVLCALVAVQAAVLLATVPTAQASELEVGYYSKKCKGVENVVKWHVIKAIKANRRTGAALVRLIFHDCFVRGCDGSVLLDASYDNPHPEKEAPVNIGLAAFDVLXEIXAAVEKSAPAWS

SEQ ID NO: 41922 - protein, 94 aa, Zea mays subsp. mays
  peptide (1)..(94): Ceres Seq. ID no. 2787345
RAQRPSLAHQHQLATRPGFRKQKNEALCGSPLRACGCSGGGASRHRADGAGQRAGGRVLQQEMQGRGERGEVARHQGDQGQPPHRRRSRPPYLP

SEQ ID NO: 41923 - DNA, 1618 bp, Zea mays subsp. mays
  misc_feature (1)..(1618): Ceres Seq. ID no. 12380103
ataaaaaaatggcgaaatgaaattcacggtaccagggtcaaccgagcacggacgcgtaaagccaacaaggggggaccgggggagcacgaggaaaccgaggagactgacccaacccgtgcttgcggcggcgctgcgctggtgccggccacggccatgatcggcggcgggcgggcagcggatagccacccggcgtcctgctcgtcctcgtcctcgtcttcctcctcgccgtcaggcccgtcgacggggggctcccgccttcaccgcagcaagaggcgtcccgacatcctcaacatgctcatgagtgcagcatgtctcagttcatcatcttctgatactggaaaaggacaaagcaagttttcaagcaacaaagtaacacacggatttcacttagtggaaggaagatctggccatgatatggaagactaccatgtagcagagtatagatatgaaaatgatcacgaacttggtctttttgctatttatgatggacatctgggagatagtgtggccagttatttgaaagctaatctttttgacaacatactgaaagagcctctcttttggtcagaccctcaagaagcaattaaaaacgcatacagctctacaaacaaatatattctggaaaacactaggcaactaggaccaggggggtcaacagcagtcactgctattgtagttgatggtacagatatgtggattgcaaatgtaggtgattcaagagctgttttgtctgaaactggtactgccagccaggttactgttgatcacgaacctcataccactaatgaacgaaagaggatagaagaaaaaggtggttttgtctctacgttccccggtaagcatctagttgcctagctctcaggtcattgttctctccaatagctatggaatttgtcccaatgcattttctagttgctgataggtgacgttcctcgtgtaaacggccaacttgcggttgcaagagcatttggtgatcagagcctcaaggcacacttgagctcagagcctgatgttaagcatataaagataaattcaagcacagagtttgtcatacttgccagtgacgggttatggaaggtatgtgtcttccttgcgtatttcactttacgttgccgtcgccttccctatatagttcaagatttcgatatccaatctgaatcgttttctcttagttctctcttttctcgttgttcatattcactcttttaccctgtttctggtgaaggtaatgaagaaccaggaagccgttgatctggtgaagtcaaccaaggacccgcaaacagcggcgaagcgactgacgtccgaggccctgggaaggatgagcaaggacgatatctcatgcattgtcatccgttttcgatgctgactcttgggtaatccagctcatccattgccctaagctgcctgtgtgcatcagcagaactgtttcctccgtatcgtagctggtagcgtctggatctgtttgcagctcaggatcagattggtgattggactggacaggttattgaccaaagaatagaagaatgctgggtttgggtgttttcagcgtctgcaggctgttctttttttcttcttctgtgcatatatacacgttggaatcaaatatataccgtcggac

SEQ ID NO: 41924 - protein, 284 aa, Zea mays subsp. mays
  peptide (1)..(284): Ceres Seq. ID no. 12380104
  misc_feature (124)..(279): Pfam Name: Pfam Description:  Protein phosphatase 2C
  misc_feature (139)..(279): NCBI GI NO: 38567903 NR Description: OSJNBa0060N03.23
  misc_feature (106)..(279): NCBI GI NO: 23307574 NR Description: putative protein phosphatase 2C homolog
  misc_feature (94)..(279): NCBI GI NO: 18417190 NR Description: protein phosphatase 2C
  misc_feature (124)..(279): NCBI GI NO: 7488280 NR Description: protein phosphatase 2C homolog F20O9
  misc_feature (108)..(279): NCBI GI NO: 18395099 NR Description: protein phosphatase 2C
  misc_feature (108)..(279): NCBI GI NO: 21537096 NR Description: protein phosphatase type 2C, putative
  misc_feature (94)..(279): NCBI GI NO: 4336436 NR Description: protein phosphatase type 2C [Lotus japonicus]
  misc_feature (108)..(279): NCBI GI NO: 15218759 NR Description: protein phosphatase 2C
  misc_feature (81)..(279): NCBI GI NO: 15232538 NR Description: protein phosphatase 2C
  misc_feature (81)..(279): NCBI GI NO: 21539551 NR Description: putative protein phosphatase type 2C
IKKWRNEIHGTRVNRARTRKANKGGPGEHEETEETDPTRACGGAALVPATAMIGGGRAADSHPASCSSSSSSSSSPSGPSTGGSRLHRSKRRPDILNMLMSAACLSSSSSDTGKGQSKFSSNKVTHGFHLVEGRSGHDMEDYHVAEYRYENDHELGLFAIYDGHLGDSVASYLKANLFDNILKEPLFWSDPQEAIKNAYSSTNKYILENTRQLGPGGSTAVTAIVVDGTDMWIANVGDSRAVLSETGTASQVTVDHEPHTTNERKRIEEKGGFVSTFPGKHLVA

SEQ ID NO: 41925 - protein, 233 aa, Zea mays subsp. mays
  peptide (1)..(233): Ceres Seq. ID no. 12380105
  misc_feature (73)..(228): Pfam Name: Pfam Description:  Protein phosphatase 2C
  misc_feature (88)..(228): NCBI GI NO: 38567903 NR Description: OSJNBa0060N03.23
  misc_feature (55)..(228): NCBI GI NO: 23307574 NR Description: putative protein phosphatase 2C homolog
  misc_feature (43)..(228): NCBI GI NO: 18417190 NR Description: protein phosphatase 2C
  misc_feature (73)..(228): NCBI GI NO: 7488280 NR Description: protein phosphatase 2C homolog F20O9
  misc_feature (57)..(228): NCBI GI NO: 18395099 NR Description: protein phosphatase 2C
  misc_feature (57)..(228): NCBI GI NO: 21537096 NR Description: protein phosphatase type 2C, putative
  misc_feature (43)..(228): NCBI GI NO: 4336436 NR Description: protein phosphatase type 2C [Lotus japonicus]
  misc_feature (57)..(228): NCBI GI NO: 15218759 NR Description: protein phosphatase 2C
  misc_feature (30)..(228): NCBI GI NO: 15232538 NR Description: protein phosphatase 2C
  misc_feature (30)..(228): NCBI GI NO: 21539551 NR Description: putative protein phosphatase type 2C
MIGGGRAADSHPASCSSSSSSSSSPSGPSTGGSRLHRSKRRPDILNMLMSAACLSSSSSDTGKGQSKFSSNKVTHGFHLVEGRSGHDMEDYHVAEYRYENDHELGLFAIYDGHLGDSVASYLKANLFDNILKEPLFWSDPQEAIKNAYSSTNKYILENTRQLGPGGSTAVTAIVVDGTDMWIANVGDSRAVLSETGTASQVTVDHEPHTTNERKRIEEKGGFVSTFPGKHLVA

SEQ ID NO: 41926 - protein, 187 aa, Zea mays subsp. mays
  peptide (1)..(187): Ceres Seq. ID no. 12380106
  misc_feature (27)..(182): Pfam Name: Pfam Description:  Protein phosphatase 2C
  misc_feature (42)..(182): NCBI GI NO: 38567903 NR Description: OSJNBa0060N03.23
  misc_feature (9)..(182): NCBI GI NO: 23307574 NR Description: putative protein phosphatase 2C homolog
  misc_feature (1)..(182): NCBI GI NO: 18417190 NR Description: protein phosphatase 2C
  misc_feature (27)..(182): NCBI GI NO: 7488280 NR Description: protein phosphatase 2C homolog F20O9
  misc_feature (11)..(182): NCBI GI NO: 18395099 NR Description: protein phosphatase 2C
  misc_feature (11)..(182): NCBI GI NO: 21537096 NR Description: protein phosphatase type 2C, putative
  misc_feature (1)..(182): NCBI GI NO: 4336436 NR Description: protein phosphatase type 2C [Lotus japonicus]
  misc_feature (11)..(182): NCBI GI NO: 15218759 NR Description: protein phosphatase 2C
  misc_feature (1)..(182): NCBI GI NO: 15232538 NR Description: protein phosphatase 2C
  misc_feature (1)..(182): NCBI GI NO: 21539551 NR Description: putative protein phosphatase type 2C
MLMSAACLSSSSSDTGKGQSKFSSNKVTHGFHLVEGRSGHDMEDYHVAEYRYENDHELGLFAIYDGHLGDSVASYLKANLFDNILKEPLFWSDPQEAIKNAYSSTNKYILENTRQLGPGGSTAVTAIVVDGTDMWIANVGDSRAVLSETGTASQVTVDHEPHTTNERKRIEEKGGFVSTFPGKHLVA

SEQ ID NO: 41927 - DNA, 1777 bp, Zea mays subsp. mays
  misc_feature (1)..(1777): Ceres Seq. ID no. 12384320
gcacgagaccattacctagaacatcctaatcaaaaaaagcaaaaacatattcctgtaataatagactgcctactccgtcttcctccgtatctctccctctctctgcttcctgtgtgcttctgttctgttagataggttaacatttggtatcagaagtccgtcgatccttggatctcgcatggcgaccacaggcgcagttgatgcccagctcaccctcgcgttggaatctcaaacgcgctccctgctgtctgaattggacaagcgcatccatgccatcgactccaagtgggcaaaccgcgtgggaatcctggagactcaagtggccgattccaccaggcgtttggagtcgttctccagggggatccatgaagacctggaggcccgtttggtgacagccgatgaagctgtggatgatcggatccgctatctggaggcgagtacgatctcccgtgtcgcggcgctcgagtcgtcttctcaagccgttgagctctggcggccccaaatcgatgcgtcgattgacgggctctatgccaacatccagacgattcgcgccgacatcgcgcagatcgtgacccaacaacctcccaacagccgttccggcgggttcggcgcagccggcatcctcggaacccccagatcggtgattgggcgttcccctgctaccttcgacaacaccgattgctcacgttttgggcccggcgctgcaatttttcaccgggacagtggtattgggtataatcaacccaatttccgctgcccggtcacgggtgcgtggaacaatccttctccttcgtttacgtttcctactcagtatgatcatagtggccatgttcccttgcaccgtcagttaggggatttgcccaagctttcatttcccaagtttgacggtactagcccaaaattatggcagaaacgatgcgaggattattttgctatgtatgccactgaaatcactgtttgggtcagagtagcgtccatgcactttgagggggttgctgggtgttggtttcagtctattgaaccacaagtgtcttcctggtcatggcaacagttttgtcaagctgtgcacgatcgttttgggcgtgaacaacacgagcttgttattcgcaagctgttccatatccgtcagacatcttcggtccaggattatgttgatcgtttttgtgaacttattgatgtccttgtcacctatgagcacactacagatcctttgtattataccatgaaattcattgatggcctccgtgacgatattaaatctgttatattggttcaacgccccagcactttggatggatactgcctgcgctcttgctttgttacaggaagaggcagattcatcccggcgtcgttagcatcgtgggtcggagggtgcgttcccagggcgttcatatccgaagttacctgctcctcctcctcctaggtgggataaatcgctgggaggggaaactgtcgccaccaagcctgtggtccctcagccgggttcttctactgacaagctcgcatcccttcgtgcttatcgtcatgcctgaggtctgtgtcaatattgcgctgaaaaatgggacaagggtcacaagtgcgctcagacagttcagctgcatgctatccaggaagtatgggatctgttgaatccggaactcaccggatcagaaggtgatttcgaagattccacggatcagttcatgatgttattgtcccgagaggccagttctccaaaaactgcatattctacgttcaaacttcaagggtatatccaaggaattccactgatgatttt

SEQ ID NO: 41928 - protein, 414 aa, Zea mays subsp. mays
  peptide (1)..(414): Ceres Seq. ID no. 12384321
  misc_feature (263)..(357): Pfam Name: Pfam Description:  Retrotransposon gag protein
  misc_feature (55)..(375): NCBI GI NO: 18568269 NR Description: putative gag-pol polyprotein [Zea mays]
  misc_feature (67)..(375): NCBI GI NO: 32489310 NR Description: OSJNBa0060B20.14
  misc_feature (93)..(372): NCBI GI NO: 21671877 NR Description: Putative retroelement
  misc_feature (94)..(372): NCBI GI NO: 38346992 NR Description: OSJNBb0062H02.17
  misc_feature (221)..(375): NCBI GI NO: 38568032 NR Description: OSJNBa0065J03.2
  misc_feature (199)..(375): NCBI GI NO: 15451606 NR Description: Putative mutator-like transposase [Oryza sativa]
  misc_feature (204)..(375): NCBI GI NO: 37536012 NR Description: putative gag-pol polyprotein
  misc_feature (179)..(372): NCBI GI NO: 37531486 NR Description: putative retroelement
  misc_feature (187)..(375): NCBI GI NO: 38346427 NR Description: OSJNBa0019J05.12
  misc_feature (227)..(372): NCBI GI NO: 38345562 NR Description: OSJNBa0032F06.19
MATTGAVDAQLTLALESQTRSLLSELDKRIHAIDSKWANRVGILETQVADSTRRLESFSRGIHEDLEARLVTADEAVDDRIRYLEASTISRVAALESSSQAVELWRPQIDASIDGLYANIQTIRADIAQIVTQQPPNSRSGGFGAAGILGTPRSVIGRSPATFDNTDCSRFGPGAAIFHRDSGIGYNQPNFRCPVTGAWNNPSPSFTFPTQYDHSGHVPLHRQLGDLPKLSFPKFDGTSPKLWQKRCEDYFAMYATEITVWVRVASMHFEGVAGCWFQSIEPQVSSWSWQQFCQAVHDRFGREQHELVIRKLFHIRQTSSVQDYVDRFCELIDVLVTYEHTTDPLYYTMKFIDGLRDDIKSVILVQRPSTLDGYCLRSCFVTGRGRFIPASLASWVGGCVPRAFISEVTCSSSS

SEQ ID NO: 41929 - DNA, 1444 bp, Zea mays subsp. mays
  misc_feature (1)..(1444): Ceres Seq. ID no. 12391561
atatagtgtgtcactttgtcccctcctacgcgacttcccctccaattcaggcgctctctctctcgatccatgcatctcaactcaaaggcattcaattaattaattatactagctagctaggaggaggagtactccggccggccggccggcgcccataagaacctctcgtgttgtgtatgcatcgatcgatcgatcgatcgatctccgactccgacgacctcgctatccgccatggctagcagcagcagtcttgtcaagtgcctggcggtcacggtggcggtggcgctcctggcgctgtcgtcgtgtggcgtggttgcctcggcggcggcgtggaggggcaagcctcagaagttgaagcccggggagaagccctccggcaaatccaagttcttcgccctcacccccggaatgttcggccacaagcgcgactaccaggccgcctgctccgacgagggtggcccggcatgctacgtgggttgcccaaaggattgccctaacaaatgcctcgtcttctgcgcctactgcctcagcttctgcatgtgtgatatcttccccggcacctcctgcggcgacccgcgcttcaccggcggcgacggcaacaccttctacttccatggaaacaaggacaaggacttctgcctcgtctccgacgcgggcctccacatcaacgcccacttcatcggcaaccacaacccggccctcaaccgcgacttcacgtgggtgcaggcgctgggggtcaccttcgtcgcaccaggcggcgccggcgaccgccaccgcctctacgtcggcgcccgcagggccgcggagtgggacgaggaggacgaccacatccagctcaccttggacgccgagcccgtcgacgtcgacgccgtcaagaacgcgcgctgggcgtccaaggccctcccggggctctccgtcacgcgcatggacgccgtcaacaccgtcatggtggagctggacggcgtcttcgccatctccgccaacgccgtgcccatcaccgacagggacgaccggatccacggctacggcaagacgggcgccgacagcctcgtgcacctcgacctggccttccagttccataacctcaccgcggacgtccacggcgtcctgggccagacctaccgccctggctacgtcagcaagctcgacatcggcgccaagatgcccgtcatgggcggcgcgcccaagtacctgtccgccggtctcttctccacggactgcgccgtctcccggttccactctttcgcctccgcctaatactaagtcccaagcgcgaccgatcctattcctatccacggcgtgaaataagatttctgtatgtaggctcttatctcatctcatcgtatgaaaatgtacacgtgcgttgctgcattggaagtacgtattgttgcacgatcaactgaataacttgcgtctcgaaaattttatgcactagtacgttcgc

SEQ ID NO: 41930 - protein, 341 aa, Zea mays subsp. mays
  peptide (1)..(341): Ceres Seq. ID no. 12391562
  misc_feature (11)..(336): NCBI GI NO: 34905940 NR Description: similar to root cap protein
  misc_feature (13)..(335): NCBI GI NO: 34905936 NR Description: similar to root cap protein
  misc_feature (47)..(335): NCBI GI NO: 34905930 NR Description: similar to root cap protein
  misc_feature (45)..(340): NCBI GI NO: 34905934 NR Description: similar to root cap protein
  misc_feature (79)..(335): NCBI GI NO: 4514635 NR Description: root cap protein 1 [Zea mays]
  misc_feature (76)..(335): NCBI GI NO: 21741738 NR Description: OSJNBa0073L04.18
  misc_feature (16)..(335): NCBI GI NO: 4514637 NR Description: root cap protein 2 [Zea mays]
  misc_feature (71)..(335): NCBI GI NO: 11994465 NR Description: contains similarity to late embryogenesis abundantprotein~gene_id:MLD14
  misc_feature (71)..(335): NCBI GI NO: 30685319 NR Description: late embryogenesis abundant protein -related
  misc_feature (68)..(341): NCBI GI NO: 7484468 NR Description: late embryonic abundant protein EMB7
MASSSSLVKCLAVTVAVALLALSSCGVVASAAAWRGKPQKLKPGEKPSGKSKFFALTPGMFGHKRDYQAACSDEGGPACYVGCPKDCPNKCLVFCAYCLSFCMCDIFPGTSCGDPRFTGGDGNTFYFHGNKDKDFCLVSDAGLHINAHFIGNHNPALNRDFTWVQALGVTFVAPGGAGDRHRLYVGARRAAEWDEEDDHIQLTLDAEPVDVDAVKNARWASKALPGLSVTRMDAVNTVMVELDGVFAISANAVPITDRDDRIHGYGKTGADSLVHLDLAFQFHNLTADVHGVLGQTYRPGYVSKLDIGAKMPVMGGAPKYLSAGLFSTDCAVSRFHSFASA

SEQ ID NO: 41931 - protein, 282 aa, Zea mays subsp. mays
  peptide (1)..(282): Ceres Seq. ID no. 12391563
  misc_feature (1)..(277): NCBI GI NO: 34905940 NR Description: similar to root cap protein
  misc_feature (1)..(276): NCBI GI NO: 34905936 NR Description: similar to root cap protein
  misc_feature (1)..(276): NCBI GI NO: 34905930 NR Description: similar to root cap protein
  misc_feature (1)..(281): NCBI GI NO: 34905934 NR Description: similar to root cap protein
  misc_feature (20)..(276): NCBI GI NO: 4514635 NR Description: root cap protein 1 [Zea mays]
  misc_feature (17)..(276): NCBI GI NO: 21741738 NR Description: OSJNBa0073L04.18
  misc_feature (1)..(276): NCBI GI NO: 4514637 NR Description: root cap protein 2 [Zea mays]
  misc_feature (12)..(276): NCBI GI NO: 11994465 NR Description: contains similarity to late embryogenesis abundantprotein~gene_id:MLD14
  misc_feature (12)..(276): NCBI GI NO: 30685319 NR Description: late embryogenesis abundant protein -related
  misc_feature (9)..(282): NCBI GI NO: 7484468 NR Description: late embryonic abundant protein EMB7
MFGHKRDYQAACSDEGGPACYVGCPKDCPNKCLVFCAYCLSFCMCDIFPGTSCGDPRFTGGDGNTFYFHGNKDKDFCLVSDAGLHINAHFIGNHNPALNRDFTWVQALGVTFVAPGGAGDRHRLYVGARRAAEWDEEDDHIQLTLDAEPVDVDAVKNARWASKALPGLSVTRMDAVNTVMVELDGVFAISANAVPITDRDDRIHGYGKTGADSLVHLDLAFQFHNLTADVHGVLGQTYRPGYVSKLDIGAKMPVMGGAPKYLSAGLFSTDCAVSRFHSFASA

SEQ ID NO: 41932 - protein, 239 aa, Zea mays subsp. mays
  peptide (1)..(239): Ceres Seq. ID no. 12391564
  misc_feature (1)..(234): NCBI GI NO: 34905940 NR Description: similar to root cap protein
  misc_feature (1)..(233): NCBI GI NO: 34905936 NR Description: similar to root cap protein
  misc_feature (1)..(233): NCBI GI NO: 34905930 NR Description: similar to root cap protein
  misc_feature (1)..(238): NCBI GI NO: 34905934 NR Description: similar to root cap protein
  misc_feature (1)..(233): NCBI GI NO: 4514635 NR Description: root cap protein 1 [Zea mays]
  misc_feature (1)..(233): NCBI GI NO: 21741738 NR Description: OSJNBa0073L04.18
  misc_feature (1)..(233): NCBI GI NO: 4514637 NR Description: root cap protein 2 [Zea mays]
  misc_feature (1)..(233): NCBI GI NO: 11994465 NR Description: contains similarity to late embryogenesis abundantprotein~gene_id:MLD14
  misc_feature (1)..(233): NCBI GI NO: 30685319 NR Description: late embryogenesis abundant protein -related
  misc_feature (1)..(239): NCBI GI NO: 7484468 NR Description: late embryonic abundant protein EMB7
MCDIFPGTSCGDPRFTGGDGNTFYFHGNKDKDFCLVSDAGLHINAHFIGNHNPALNRDFTWVQALGVTFVAPGGAGDRHRLYVGARRAAEWDEEDDHIQLTLDAEPVDVDAVKNARWASKALPGLSVTRMDAVNTVMVELDGVFAISANAVPITDRDDRIHGYGKTGADSLVHLDLAFQFHNLTADVHGVLGQTYRPGYVSKLDIGAKMPVMGGAPKYLSAGLFSTDCAVSRFHSFASA

SEQ ID NO: 41933 - DNA, 1318 bp, Zea mays subsp. mays
  misc_feature (1)..(1318): Ceres Seq. ID no. 12454822
gcacgagaccattacctagaacatcctaatcgaaaaagacacagatagctagaacacgagcagaggatggctaggcctaggccgtcggtcgtcgtcctcgcggtggccgtcgccgtcgccgtggcgtccctcgcgcagcccggcgcggccgacctgaagctggactactacgcgagcacctgccccaacgcggaggccatcgtgcgcggcgtggtgcagcagcgactgcaggccaccatccgggccgtcggctccaccgtccgcctcttcttccacgactgcttcgtcgagggttgcgacggctcggtgctgatcgaatccacgcccggcaaccaggccgagaaggacgcctccgacaacaagtccctcgcgtccgaaggcttcgacaccgtgcggagcgccaaggccgccgtcgaggccgcctgcccggacacggtctcctgcgccgacgtgctcgccattgccgctcgggacgccatctccatgagtggcgggcctttcttcccagtggagctgggcaggctggacggcctgagctccaccgccagcagcgtgccaggccagctgcccgaggccaaccagaccatggaccagctgctggcagtcttcaaggcacacgggctcaacatgtcacgacctcgtcgcgctctcagcggcgcacagcgtggggctggcgcactgcagcaagttcgcgagccggctgtacagctaccagctgccggggcagccgacggacccgacgctgaaccccaagtacgcgcggttcctggagagcaagtgccccgacggcgggcccgacaacctggtgctcatggaccaggcctcgccggcgcagttcgacaaccagtactaccgcaacctccaggacggcggcgggctgctgggctccgaccagctgctctacaccgacaaccggacgcgccccatggtggactcgctggccaacagcaccgccgccttctaccgcgccttagccgacgccgtcgtccggctcggccgcgtcggggtcaagtccggcaggcggggcaacgtccgcaagcagtgcgacgtgttcaactgacagggaaatcgtgttcaacctccggaagattcatttgatttgggtgttttgcttgtaatgcagctgttctctttgattcgttgcatagcacgcggttgctgattcttaaacttgtgtgtggtaattattcagcaattagttgttctacaaagtggtgaataatggttctgcctgctttgtcatagagtaaaaccccaaatagcagccaaaattagatcatacatagatacagttgatttcactgtaatttgaatactc

SEQ ID NO: 41934 - protein, 343 aa, Zea mays subsp. mays
  peptide (1)..(343): Ceres Seq. ID no. 12454823
  misc_feature (46)..(189): Pfam Name: Pfam Description:  Peroxidase
  misc_feature (1)..(198): NCBI GI NO: 17027271 NR Description: putative peroxidase
  misc_feature (5)..(189): NCBI GI NO: 34915320 NR Description: putative peroxidase
  misc_feature (11)..(198): NCBI GI NO: 7433082 NR Description: probable peroxidase (EC 1
  misc_feature (9)..(198): NCBI GI NO: 14485511 NR Description: putative peroxidase [Solanum tuberosum]
  misc_feature (8)..(198): NCBI GI NO: 15235600 NR Description: peroxidase, putative; protein id: At4g37530
  misc_feature (8)..(198): NCBI GI NO: 17979440 NR Description: putative peroxidase [Arabidopsis thaliana]
  misc_feature (13)..(198): NCBI GI NO: 17027274 NR Description: putative peroxidase
  misc_feature (9)..(198): NCBI GI NO: 4138647 NR Description: peroxidase [Trifolium repens]
  misc_feature (28)..(198): NCBI GI NO: 7433086 NR Description: peroxidase (EC 1
  misc_feature (9)..(198): NCBI GI NO: 15229646 NR Description: peroxidase, putative; protein id: At3g49960.1
MARPRPSVVVLAVAVAVAVASLAQPGAADLKLDYYASTCPNAEAIVRGVVQQRLQATIRAVGSTVRLFFHDCFVEGCDGSVLIESTPGNQAEKDASDNKSLASEGFDTVRSAKAAVEAACPDTVSCADVLAIAARDAISMSGGPFFPVELGRLDGLSSTASSVPGQLPEANQTMDQLLAVFKAHGLNMSRPRRALSGAQRGAGALQQVREPAVQLPAAGAADGPDAEPQVRAVPGEQVPRRRARQPGAHGPGLAGAVRQPVLPQPPGRRRAAGLRPAALHRQPDAPHGGLAGQQHRRLLPRLSRRRRPARPRRGQVRQAGQRPQAVRRVQLTGKSCSTSGRFI

SEQ ID NO: 41935 - protein, 204 aa, Zea mays subsp. mays
  peptide (1)..(204): Ceres Seq. ID no. 12454824
  misc_feature (1)..(59): NCBI GI NO: 17027271 NR Description: putative peroxidase
  misc_feature (1)..(50): NCBI GI NO: 34915320 NR Description: putative peroxidase
  misc_feature (1)..(59): NCBI GI NO: 7433082 NR Description: probable peroxidase (EC 1
  misc_feature (1)..(59): NCBI GI NO: 14485511 NR Description: putative peroxidase [Solanum tuberosum]
  misc_feature (1)..(59): NCBI GI NO: 15235600 NR Description: peroxidase, putative; protein id: At4g37530
  misc_feature (1)..(59): NCBI GI NO: 17979440 NR Description: putative peroxidase [Arabidopsis thaliana]
  misc_feature (1)..(59): NCBI GI NO: 17027274 NR Description: putative peroxidase
  misc_feature (1)..(59): NCBI GI NO: 4138647 NR Description: peroxidase [Trifolium repens]
  misc_feature (1)..(59): NCBI GI NO: 7433086 NR Description: peroxidase (EC 1
  misc_feature (1)..(59): NCBI GI NO: 15229646 NR Description: peroxidase, putative; protein id: At3g49960.1
MSGGPFFPVELGRLDGLSSTASSVPGQLPEANQTMDQLLAVFKAHGLNMSRPRRALSGAQRGAGALQQVREPAVQLPAAGAADGPDAEPQVRAVPGEQVPRRRARQPGAHGPGLAGAVRQPVLPQPPGRRRAAGLRPAALHRQPDAPHGGLAGQQHRRLLPRLSRRRRPARPRRGQVRQAGQRPQAVRRVQLTGKSCSTSGRFI

SEQ ID NO: 41936 - DNA, 1608 bp, Zea mays subsp. mays
  misc_feature (1)..(1608): Ceres Seq. ID no. 12589090
  misc_feature (531)..(531): n is a, c, t, g, unknown, or other
  misc_feature (530)..(530): n is a, c, t, g, unknown, or other
  misc_feature (666)..(666): n is a, c, t, g, unknown, or other
ctattcattcatccggccaccaccgctctaactactcttcaagagacgacgaccaacaggcacgtcgatcgtcttccggcgagggcgacggaaggatgtccggcggcgagagtggtccggcagcggcggcggcggccgttccgttgctgcaggcgccggaggggaggacgacgaagtactacgagggatgccccgggtgccggctggacgaggccaacaagactaggaccggcgtcccctacctcaatttcttctacatctgggtcgtctgcctcgccgccgcactgccggtccagtcactgttcccttatctatacttcatgatcagggacttgaaagtggcgaaagaggagcaagacattgggttttatgctggttttgttggggctacctatttccttggaagggccatcagcgctgtgccatggggcatgttcgctgacaagtatggaaggaagccatgcattgtgatcagcatcctctcagtgattgtgttcaacacactgtttggacttagcacaacttactgnntggcaattgtgactaggggattacttgggttgctatgtggcatacttggacccatcaaggcctatgcttcagaagtctgcaggaaagagcaccaagctctgggaatctctcttgttacatcttcacgagccatanctcttgttattgggcctgctattggaggcttccttgcacagcctgcacagaagtacccaaatcttttctctgaagagtccatatttggaaggtttccatacttccttccttgctttgtaatatcgttgctagcagcaggatcatgtattgcatgcatttggcttccggaaacgctacactttcatggtgatgacaaagtagaagctattgaagaactggaggcacaagttcgtggctccgaatctacaaaagatctgcataagaattggcaattgatgtcagcaataatcctctactgtgtcttttctatgcatgacacagcttatcttgaggtattttcactgtgggctgtgagcagtagaaaatttcgggggcttagtttgacatcccaggatgttggtactgtgctagccatctcaggttttggtgtacttgtataccaactcgctatttatccttttcttgcgaagtattttggaccaatcaagacatttcggcctgccgcgatcctgtcgatcattctcctcactacgtaccccttcatggccaatttacatggcctggagcttaaaatactcatcaacattgcatctgttttgaagaacatgtttgcggctaccatcactattgcctgcaacatcctacagaacactgcagtgacgcaagagcagagaggcgttgctaatggcatctctgttaccctgatgtccgtgttcaaatctgtagctccagcagcagcaggaattctgttctcgtgggctcagaagcacatcagcggactgttcttaccaggggatcagatcttgttcctagcgataaacatggtgtcggtgattggcctggtgctgacgttcaagccatttttctccctaccgaatccaacgaggcattcataaatctgtgtagatgaagcccgttcctgtgaattgtatcgatgcactg

SEQ ID NO: 41937 - protein, 519 aa, Zea mays subsp. mays
  peptide (1)..(519): Ceres Seq. ID no. 12589091
  misc_feature (85)..(514): Pfam Name: and other Pfam Description: Sugar
  misc_feature (30)..(514): NCBI GI NO: 23452821 NR Description: major facilitator superfamily antiporter
  misc_feature (56)..(513): NCBI GI NO: 23452823 NR Description: major facilitator superfamily antiporter
  misc_feature (59)..(511): NCBI GI NO: 30684565 NR Description: transporter-related protein [Arabidopsis thaliana]
  misc_feature (59)..(511): NCBI GI NO: 22326785 NR Description: transporter-like protein; protein id: At5g13740
  misc_feature (134)..(518): NCBI GI NO: 34903136 NR Description: unnamed protein product
  misc_feature (61)..(511): NCBI GI NO: 15229781 NR Description: transporter-like protein; protein id: At3g43790.1
  misc_feature (75)..(511): NCBI GI NO: 20260160 NR Description: transporter-like protein [Arabidopsis thaliana]
  misc_feature (73)..(487): NCBI GI NO: 10177340 NR Description: transporter-like protein [Arabidopsis thaliana]
  misc_feature (133)..(513): NCBI GI NO: 23452819 NR Description: major facilitator superfamily antiporter
  misc_feature (133)..(511): NCBI GI NO: 30684567 NR Description: transporter-related protein [Arabidopsis thaliana]
  misc_feature (176)..(176): Xaa is any aa, unknown or other
  misc_feature (177)..(177): Xaa is any aa, unknown or other
  misc_feature (222)..(222): Xaa is any aa, unknown or other
IHSSGHHRSNYSSRDDDQQARRSSSGEGDGRMSGGESGPAAAAAAVPLLQAPEGRTTKYYEGCPGCRLDEANKTRTGVPYLNFFYIWVVCLAAALPVQSLFPYLYFMIRDLKVAKEEQDIGFYAGFVGATYFLGRAISAVPWGMFADKYGRKPCIVISILSVIVFNTLFGLSTTYXXAIVTRGLLGLLCGILGPIKAYASEVCRKEHQALGISLVTSSRAIXLVIGPAIGGFLAQPAQKYPNLFSEESIFGRFPYFLPCFVISLLAAGSCIACIWLPETLHFHGDDKVEAIEELEAQVRGSESTKDLHKNWQLMSAIILYCVFSMHDTAYLEVFSLWAVSSRKFRGLSLTSQDVGTVLAISGFGVLVYQLAIYPFLAKYFGPIKTFRPAAILSIILLTTYPFMANLHGLELKILINIASVLKNMFAATITIACNILQNTAVTQEQRGVANGISVTLMSVFKSVAPAAAGILFSWAQKHISGLFLPGDQILFLAINMVSVIGLVLTFKPFFSLPNPTRHS

SEQ ID NO: 41938 - protein, 488 aa, Zea mays subsp. mays
  peptide (1)..(488): Ceres Seq. ID no. 12589092
  misc_feature (54)..(483): Pfam Name: and other Pfam Description: Sugar
  misc_feature (1)..(483): NCBI GI NO: 23452821 NR Description: major facilitator superfamily antiporter
  misc_feature (25)..(482): NCBI GI NO: 23452823 NR Description: major facilitator superfamily antiporter
  misc_feature (28)..(480): NCBI GI NO: 30684565 NR Description: transporter-related protein [Arabidopsis thaliana]
  misc_feature (28)..(480): NCBI GI NO: 22326785 NR Description: transporter-like protein; protein id: At5g13740
  misc_feature (103)..(487): NCBI GI NO: 34903136 NR Description: unnamed protein product
  misc_feature (30)..(480): NCBI GI NO: 15229781 NR Description: transporter-like protein; protein id: At3g43790.1
  misc_feature (44)..(480): NCBI GI NO: 20260160 NR Description: transporter-like protein [Arabidopsis thaliana]
  misc_feature (42)..(456): NCBI GI NO: 10177340 NR Description: transporter-like protein [Arabidopsis thaliana]
  misc_feature (102)..(482): NCBI GI NO: 23452819 NR Description: major facilitator superfamily antiporter
  misc_feature (102)..(480): NCBI GI NO: 30684567 NR Description: transporter-related protein [Arabidopsis thaliana]
  misc_feature (145)..(145): Xaa is any aa, unknown or other
  misc_feature (146)..(146): Xaa is any aa, unknown or other
  misc_feature (191)..(191): Xaa is any aa, unknown or other
MSGGESGPAAAAAAVPLLQAPEGRTTKYYEGCPGCRLDEANKTRTGVPYLNFFYIWVVCLAAALPVQSLFPYLYFMIRDLKVAKEEQDIGFYAGFVGATYFLGRAISAVPWGMFADKYGRKPCIVISILSVIVFNTLFGLSTTYXXAIVTRGLLGLLCGILGPIKAYASEVCRKEHQALGISLVTSSRAIXLVIGPAIGGFLAQPAQKYPNLFSEESIFGRFPYFLPCFVISLLAAGSCIACIWLPETLHFHGDDKVEAIEELEAQVRGSESTKDLHKNWQLMSAIILYCVFSMHDTAYLEVFSLWAVSSRKFRGLSLTSQDVGTVLAISGFGVLVYQLAIYPFLAKYFGPIKTFRPAAILSIILLTTYPFMANLHGLELKILINIASVLKNMFAATITIACNILQNTAVTQEQRGVANGISVTLMSVFKSVAPAAAGILFSWAQKHISGLFLPGDQILFLAINMVSVIGLVLTFKPFFSLPNPTRHS

SEQ ID NO: 41939 - protein, 413 aa, Zea mays subsp. mays
  peptide (1)..(413): Ceres Seq. ID no. 12589093
  misc_feature (1)..(408): Pfam Name: and other Pfam Description: Sugar
  misc_feature (1)..(408): NCBI GI NO: 23452821 NR Description: major facilitator superfamily antiporter
  misc_feature (1)..(407): NCBI GI NO: 23452823 NR Description: major facilitator superfamily antiporter
  misc_feature (1)..(405): NCBI GI NO: 30684565 NR Description: transporter-related protein [Arabidopsis thaliana]
  misc_feature (1)..(405): NCBI GI NO: 22326785 NR Description: transporter-like protein; protein id: At5g13740
  misc_feature (28)..(412): NCBI GI NO: 34903136 NR Description: unnamed protein product
  misc_feature (1)..(405): NCBI GI NO: 15229781 NR Description: transporter-like protein; protein id: At3g43790.1
  misc_feature (1)..(405): NCBI GI NO: 20260160 NR Description: transporter-like protein [Arabidopsis thaliana]
  misc_feature (1)..(381): NCBI GI NO: 10177340 NR Description: transporter-like protein [Arabidopsis thaliana]
  misc_feature (27)..(407): NCBI GI NO: 23452819 NR Description: major facilitator superfamily antiporter
  misc_feature (27)..(405): NCBI GI NO: 30684567 NR Description: transporter-related protein [Arabidopsis thaliana]
  misc_feature (70)..(70): Xaa is any aa, unknown or other
  misc_feature (71)..(71): Xaa is any aa, unknown or other
  misc_feature (116)..(116): Xaa is any aa, unknown or other
MIRDLKVAKEEQDIGFYAGFVGATYFLGRAISAVPWGMFADKYGRKPCIVISILSVIVFNTLFGLSTTYXXAIVTRGLLGLLCGILGPIKAYASEVCRKEHQALGISLVTSSRAIXLVIGPAIGGFLAQPAQKYPNLFSEESIFGRFPYFLPCFVISLLAAGSCIACIWLPETLHFHGDDKVEAIEELEAQVRGSESTKDLHKNWQLMSAIILYCVFSMHDTAYLEVFSLWAVSSRKFRGLSLTSQDVGTVLAISGFGVLVYQLAIYPFLAKYFGPIKTFRPAAILSIILLTTYPFMANLHGLELKILINIASVLKNMFAATITIACNILQNTAVTQEQRGVANGISVTLMSVFKSVAPAAAGILFSWAQKHISGLFLPGDQILFLAINMVSVIGLVLTFKPFFSLPNPTRHS
